(19) United States
(12) Patent Application Publication
(10) Pub. No.: US 2024/0150767 A1
(43) Pub. Date: May 9, 2024

(54) SUPEROXIDE DISMUTASE 1 (SOD1) iRNA COMPOSITIONS AND METHODS OF USE THEREOF FOR TREATING OR PREVENTING SUPEROXIDE DISMUTASE 1- (SOD1-) ASSOCIATED NEURODEGENERATIVE DISEASES

(71) Applicant: Alnylam Pharmaceuticals, Inc., Cambridge, MA (US)

(72) Inventors: Adam Castoreno, Framingham, MA (US); Jason Gilbert, Hingham, MA (US); Charalambos Kaittanis, Cambridge, MA (US); James D. McIninch, Burlington, MA (US); Stuart Milstein, Arlington, MA (US); Mark K. Schlegel, Boston, MA (US)

(73) Assignee: Alnylam Pharmaceuticals, Inc., Cambridge, MA (US)

(21) Appl. No.: 18/131,892

(22) Filed: Apr. 7, 2023

Related U.S. Application Data
(63) Continuation of application No. 17/852,554, filed on Jun. 29, 2022, now Pat. No. 11,649,459.
Application No. 17/852,554 is a continuation of application No. PCT/US2022/016046, filed on Feb. 11, 2022.
(60) Provisional application No. 63/270,176, filed on Oct. 21, 2021.
(60) Provisional application No. 63/148,991, filed on Feb. 12, 2021.

(51) Int. Cl. C12N 15/113; A61P 25/00; C12N 9/02

(52) U.S. Cl. CPC C12N 15/1137; A61P 25/00; C12N 9/0089; C12N 2310/111; C12N 2310/14; C12N 2310/53; C12N 2320/31; C12Y 115/01001

(57) ABSTRACT

The disclosure relates to double stranded ribonucleic acid (dsRNAi) agents and compositions targeting a SOD1 gene, as well as methods of inhibiting expression of a SOD1 gene and methods of treating subjects having a SOD1-associated neurodegenerative disease or disorder, e.g., Amyotrophic Lateral Sclerosis (ALS), Alzheimer's disease (AD), Parkinson's disease (PD), and Down's syndrome (DS), using such dsRNAi agents and compositions.

### RELATED APPLICATIONS

[0001] This is a continuation of U.S. patent application Ser. No. 17/852,554, filed on Jun. 29, 2022, which is a 35 § U.S.C. 111(a) continuation application which claims the benefit of priority to PCT/US2022/016046, filed on Feb. 11, 2022, which claims the benefit of priority to U.S. Provisional Application No. 63/148,991, filed on Feb. 12, 2021, and U.S. Provisional Application No. 63/270,176, filed on Oct. 21, 2021. The entire contents of each of the foregoing applications are incorporated herein by reference.

### SEQUENCE LISTING

[0002] The instant application contains a Sequence Listing which has been submitted electronically in XML file format and is hereby incorporated by reference in its entirety. Said XML copy, created on Dec. 27, 2023, is named 121301_12704_SLReplacement.xml and is 10,101,889 bytes in size. The sequence listing contained in this .XML file is part of the specification and is hereby incorporated by reference herein in its entirety.

### BACKGROUND OF THE INVENTION

[0003] Superoxide dismutase 1 (SOD1), also known as Cu/Zn superoxide dismutase (Cu/ZnSOD), is a ubiquitously expressed antioxidant enzyme that metabolizes superoxide radicals produced during cellular metabolism to molecular oxygen and hydrogen peroxide, and plays an important role in protecting cells from oxidative damage (McCord J M and Fridovich I. (1969) J Bio Chem. 244:6049-6055; Rosen D R (1993) Nature. 364:362; Trist B, et al. (2020) Angew Chem Int Ed Engl. Accepted Author Manuscript). The human SOD1 gene is located on chromosome 21q22.11 and it produces a 16 kDa protein that normally forms a 32 kDa homodimer. In mammalian cells, SOD1 is widely distributed in the cytosol, nucleus, lysosomes, peroxisomes, and intermembrane space (IMS) of mitochondria (Fukai T and Ushio-Fukai M. (2011) Antioxid Redox Signal. 15(6):1583-1606; Zhang S, et al. (2015) Free Radic Biol Med. 85:33-44; Huai J and Zhang Z. (2019) Front. Neurol. 10:527). The high cytosolic abundance of SOD1 distinguishes it from two other mammalian superoxide dismutases also involved in metabolizing superoxide radicals: the mitochondrial tetrameric manganese superoxide dismutase (SOD2) and the extracellular tetrameric Cu/Zn superoxide dismutase (SOD3). However, the activity of SOD1 accounts for approximately 50-80% of the total SOD activity in mammalian cells (Mindola P, et al. (2016) Front. Physiol. 7:594).

[0004] The structure of each SOD1 subunit consists of a β-barrel core and seven loops at the edge which are held together by an intramolecular disulfide bond, a binuclear metal binding site holding a copper and a zinc ions responsible for the catalyzing activity of SOD1, and a global hydrogen bond network (Huai J and Zhang Z. (2019) Front. Neurol. 10:527). Previous studies have shown that the stability, structure, and function of SOD1 is controlled by its posttranslational modification, metal ion binding, and disulfide bond status. Loss of the metal cofactors and/or disruption of the disulfide bonds, often associated with mutations in the SOD1 gene, can result in pathogenic misfolding, aggregation, and/or dysfunction of SOD1 protein (Huai J and Zhang Z. (2019) Front. Neurol. 10:527).

[0005] Approximately 200 mutations have been documented throughout coding and non-coding regions of the SOD1 gene. Mutant SOD1 proteins are susceptible to misfolding which can compromise protective antioxidant function and result in the formation of abnormal molecular interactions (e.g., between multiple misfolded SOD1 units (aggregation) and between misfolded SOD1 and other cellular constituents), thereby contributing to pathology through both loss-of-function actions (e.g., diminished antioxidant activity, impaired nuclear translocation and promoter binding, and disrupted SOD1 redox signaling) and gain-of-function actions (e.g., neurotoxicity) (Trist B, et al. (2020) Angew Chem Int Ed Engl. Accepted Author Manuscript). SOD1 has been implicated in contributing to the pathology of many different diseases, including, for example, heart failure, cancer (e.g., lung adenocarcinoma, non-small-cell lung cancer, and breast cancer), diabetes, Amyotrophic Lateral Sclerosis (ALS), Alzheimer's disease (AD), Parkinson's disease, and Down's syndrome (DS) (Banks C J and Anderson J L. (2019) Redox Biol. 26:101270; Trist B, et al. (2020) Angew Chem Int Ed Engl. Accepted Author Manuscript). In the context of neurodegenerative disease, SOD1 has been implicated in the initiation and/or acceleration of damaging pathways in both neurons and surrounding glia, including: disruption of proteasome function, degradation of microtubules and microfilaments, endoplasmic reticulum stress, and redox dyshomeostasis. More specifically, mutant SOD1 has been implicated in a familial form of amyotrophic lateral sclerosis (fALS) where various SOD1 mutations can increase the propensity of SOD1 to aggregate, which is understood to induce motor neuron death. Additionally, wild-type SOD1 misfolding and dysfunction has been implicated in the death of spinal cord motor neurons in sporadic ALS (aALS), in the death of substantia nigra pars compacta (SNc) dopamine neurons in Parkinson's disease, and the death of neurons within the frontal cortex and hippocampus in Alzheimer's disease (Trist B, et al. (2020) Angew Chem Int Ed Engl. Accepted Author Manuscript). In addition, SOD1 has been implicated in neuron death by exacerbating other detrimental cellular pathologies, including Aβ plaque formation in Alzheimer's disease and α-synuclein deposition in Parkinson's disease.

[0006] Effective treatments for superoxide dismutase 1-associated neurodegenerative diseases are currently not available and any treatments that are available are palliative. Thus, there remains a need for an agent that can selectively and efficiently silence the SOD1 gene using the cell's own RNAi machinery that has both high biological activity and in vivo stability, and that can effectively inhibit expression of a target SOD1 gene.

### BRIEF SUMMARY OF THE INVENTION

[0007] The present disclosure provides RNAi agent compositions which effect the RNA-induced silencing complex (RISC)-mediated cleavage of RNA transcripts of a superoxide dismutase 1 (SOD1) gene. The SOD1 gene may be within a cell, e.g., a cell within a subject, such as a human. The present disclosure also provides methods of using the RNAi agent compositions of the disclosure for inhibiting the expression of a SOD1 gene and/or for treating a subject who would benefit from inhibiting or reducing the expression of a SOD1 gene, e.g., a subject suffering or prone to suffering from a SOD1-associated neurodegenerative disease, e.g., Amyotrophic Lateral Sclerosis (ALS), Alzheimer's disease (AD), Parkinson's disease (PD), and Down's syndrome (DS).

[0008] Accordingly, in one aspect, the present invention provides a double stranded ribonucleic acid (dsRNA) agent, or a pharmaceutically acceptable salt thereof, comprising a sense strand and an antisense strand forming a double stranded region, wherein
[0009] a) the nucleotide sequence of the sense strand differs by no more than 4 bases from the nucleotide sequence 5′-csascuu(Uhd)aaUfCfCfucuauccasgsa-3′ (SEQ ID NO: 11) and the nucleotide sequence of the antisense strand differs by no more than 4 bases from the nucleotide sequence 5′-VPusdCsugdGadTagagdGaUfuaaagugsasg-3′ (SEQ ID NO: 12), wherein VP is a 5′-vinyl phosphonate; (Uhd) is 2′-O-hexadecyl-uridine-3′-phosphate; s is a phosphorothioate linkage; a, g, c and u are 2′-O-methyl (2′-OMe) A, G, C, and U; dC, dG, and dT are 2′-deoxy C, G, and T; and Cf and Uf are 2′-deoxy-2′-fluoro (2′-F) C and U;
[0010] b) the nucleotide sequence of the sense strand differs by no more than 4 bases from the nucleotide sequence 5′-csasggu(Chd)cuCfAfCfuuuaauccsusa-3′ (SEQ ID NO: 13) and the nucleotide sequence of the antisense strand differs by no more than 4 bases from the nucleotide sequence 5′-VPusdAsggdAudTaaagdTgAfggaccugscsg-3′ (SEQ ID NO: 14), wherein VP is a 5′-vinyl phosphonate; (Chd) is 2′-O-hexadecyl-cytidine-3′-phosphate; s is a phosphorothioate linkage; a, g, c and u are 2′-O-methyl (2′-OMe) A, G, C, and U; dA and dT are 2′-deoxy A and T; and Af and Cf are 2′-deoxy-2′-fluoro (2′-F) A and C;
[0011] c) the nucleotide sequence of the sense strand differs by no more than 4 bases from the nucleotide sequence 5′-ususcgag(Chd)aGfAfAfggaaaguasasa-3′ (SEQ ID NO: 15) and the nucleotide sequence of the antisense strand differs by no more than 4 bases from the nucleotide sequence 5′-VPusUfsuadCu(Tgn)uccuucUfgCfucgaasasu-3′ (SEQ ID NO: 16), wherein VP is a 5′-vinyl phosphonate; (Chd) is 2′-O-hexadecyl-cytidine-3′-phosphate; (Tgn) is thymidine-glycol nucleic acid (GNA), S-Isomer; s is a phosphorothioate linkage; a, g, c and u are 2′-O-methyl (2′-OMe) A, G, C, and U; dC is 2′-deoxy C; and Af, Cf, Gf, and Uf are 2′-deoxy-2′-fluoro (2′-F) A, C, G, and U;
[0012] d) the nucleotide sequence of the sense strand differs by no more than 4 bases from the nucleotide sequence 5′-gsasaag(Uhd)aaUfGfGfaccagugasasa-3′ (SEQ ID NO: 17) and the nucleotide sequence of the antisense strand differs by no more than 4 bases from the nucleotide sequence 5′-VPusUfsucdAc(Tgn)gguccaUfuAfcuuucscsu-3′ (SEQ ID NO: 18), wherein VP is a 5′-vinyl phosphonate; (Uhd) is 2′-O-hexadecyl-uridine-3′-phosphate; (Tgn) is thymidine-glycol nucleic acid (GNA), S-Isomer; s is a phosphorothioate linkage; a, g, c and u are 2′-O-methyl (2′-OMe) A, G, C, and U; dA is 2′-deoxy A; and Af, Gf, and Uf are 2′-deoxy-2′-fluoro (2′-F) A, G, and U;
[0013] e) the nucleotide sequence of the sense strand differs by no more than 4 bases from the nucleotide sequence 5′-asgsga(Uhd)gaaGfAfGfaggcaugususa-3′ (SEQ ID NO: 19) and the nucleotide sequence of the antisense strand differs by no more than 4 bases from the nucleotide sequence 5′-VPusAfsacdAu(G2p)ccucucUfuCfauccususu-3′ (SEQ ID NO: 20), wherein VP is a 5′-vinyl phosphonate; (Uhd) is 2′-O-hexadecyl-uridine-3′-phosphate; (G2p) is guanosine-2′-phosphate; s is a phosphorothioate linkage; a, g, c and u are 2′-O-methyl (2′-OMe) A, G, C, and U; dA is 2′-deoxy A; and Af, Cf, Gf, and Uf are 2′-deoxy-2′-fluoro (2′-F) A, C, G, and U;
[0014] f) the nucleotide sequence of the sense strand differs by no more than 4 bases from the nucleotide sequence 5′-asasgga(Ahd)agUfAfAfuggaccagsusa-3′ (SEQ ID NO: 21) and the nucleotide sequence of the antisense strand differs by no more than 4 bases from the nucleotide sequence 5′-VPusdAscudGg(Tgn)ccaudTaCfuuuccuuscsu-3′ (SEQ ID NO: 22), wherein VP is a 5′-vinyl phosphonate; (Ahd) is 2′-O-hexadecyl-adenosine-3′-phosphate; (Tgn) is thymidine-glycol nucleic acid (GNA), S-Isomer; s is a phosphorothioate linkage; a, g, c and u are 2′-O-methyl (2′-OMe) A, G, C, and U; dA, dG, and dT are 2′-deoxy A, G, and T; and Af, Cf, and Uf are 2′-deoxy-2′-fluoro (2′-F) A, C, and U;
[0015] g) the nucleotide sequence of the sense strand differs by no more than 4 bases from the nucleotide sequence 5′-asuscaa(Uhd)uuCfGfAfgcagaaggsasa-3′ (SEQ ID NO: 23) and the nucleotide sequence of the antisense strand differs by no more than 4 bases from the nucleotide sequence 5′-VPusUfsccdTu(C2p)ugcucgAfaAfuugausgsg-3′ (SEQ ID NO: 24), wherein VP is a 5′-vinyl phosphonate; (Uhd) is 2′-O-hexadecyl-uridine-3′-phosphate; (C2p) is cytidine-2′-phosphate; s is a phosphorothioate linkage; a, g, c and u are 2′-O-methyl (2′-OMe) A, G, C, and U; dT is 2′-deoxy T; and Af, Cf, Gf, and Uf are 2′-deoxy-2′-fluoro (2′-F) A, C, G, and U;
[0016] h) the nucleotide sequence of the sense strand differs by no more than 4 bases from the nucleotide sequence 5′-cscsuca(Chd)uuUfAfAfuccucuauscsa-3′ (SEQ ID NO: 25) and the nucleotide sequence of the antisense strand differs by no more than 4 bases from the nucleotide sequence 5′-VPusdGsaudAg(Agn)ggaudTaAfagugaggsasc-3′ (SEQ ID NO: 26), wherein VP is a 5′-vinyl phosphonate; (Chd) is 2′-O-hexadecyl-cytidine-3′-phosphate; (Agn) is adenosine-glycol nucleic acid (GNA), S-isomer; s is a phosphorothioate linkage; a, g, c and u are 2′-O-methyl (2′-OMe) A, G, C, and U; dA, dG, and dT are 2′-deoxy A, G, and T; and Af and Uf are 2′-deoxy-2′-fluoro (2′-F) A and U;
[0017] i) the nucleotide sequence of the sense strand differs by no more than 4 bases from the nucleotide sequence 5′-asasgga(Uhd)gaAfGfAfgaggcaugsusa-3′ (SEQ ID NO: 27) and the nucleotide sequence of the antisense strand differs by no more than 4 bases from the nucleotide sequence 5′-VPusAfscadTg(C2p)cucucuUfcAfuccuususg-3′ (SEQ ID NO: 28), wherein VP is a 5′-vinyl phosphonate; (Uhd) is 2′-O-hexadecyl-uridine-3′-phosphate; (C2p) is cytidine-2′-phosphate; s is a phosphorothioate linkage; a, g, c and u are 2′-O-methyl (2′-OMe) A, G, C, and U; dT is 2′-deoxy T; and Af, Gf, and Uf are 2′-deoxy-2′-fluoro (2′-F) A, G, and U; or
[0018] j) the nucleotide sequence of the sense strand differs by no more than 4 bases from the nucleotide sequence 5′-asasuuu(Chd)gaGfCfAfgaaggaaasgsa-3′ (SEQ ID NO: 29) and the nucleotide sequence of the antisense strand differs by no more than 4 bases from the nucleotide sequence 5′-VPusCfsuudTc(C2p)uucugcUfcGfaaauusgsg-3′ (SEQ ID NO: 30), wherein VP is a 5′-vinyl phosphonate; (Chd) is 2′-O-hexadecyl-cytidine-3′-phosphate; (C2p) is cytidine-2′-phosphate; s is a phosphorothioate linkage; a, g, c and u are 2′-O-methyl (2′-OMe) A, G, C, and U; dT is 2′-deoxy T; and Af, Cf, Gf, and Uf are 2′-deoxy-2′-fluoro (2′-F) A, C, G, and U.

[0019] In one embodiment,
[0020] a) the nucleotide sequence of the sense strand differs by no more than 3 bases from the nucleotide sequence 5′-csascuu(Uhd)aaUfCfCfucuauccasgsa-3′ (SEQ ID NO: 11) and the nucleotide sequence of the antisense strand differs by no more than 3 bases from the nucleotide sequence 5′-VPusdCsugdGadTagagdGaUfuaaagugsasg-3′ (SEQ ID NO: 12), wherein VP is a 5′-vinyl phosphonate; (Uhd) is 2′-O-hexadecyl-uridine-3′-phosphate; s is a phosphorothioate linkage; a, g, c and u are 2′-O-methyl (2′-OMe) A, G, C, and U; dC, dG, and dT are 2′-deoxy C, G, and T; and Cf and Uf are 2′-deoxy-2′-fluoro (2′-F) C and U;
[0021] b) the nucleotide sequence of the sense strand differs by no more than 3 bases from the nucleotide sequence 5′-csasggu(Chd)cuCfAfCfuuuaauccsusa-3′ (SEQ ID NO: 13) and the nucleotide sequence of the antisense strand differs by no more than 3 bases from the nucleotide sequence 5′-VPusdAsggdAudTaaagdTgAfggaccugscsg-3′ (SEQ ID NO: 14), wherein VP is a 5′-vinyl phosphonate; (Chd) is 2′-O-hexadecyl-cytidine-3′-phosphate; s is a phosphorothioate linkage; a, g, c and u are 2′-O-methyl (2′-OMe) A, G, C, and U; dA and dT are 2′-deoxy A and T; and Af and Cf are 2′-deoxy-2′-fluoro (2′-F) A and C;
[0022] c) the nucleotide sequence of the sense strand differs by no more than 3 bases from the nucleotide sequence 5′-ususcgag(Chd)aGfAfAfggaaaguasasa-3′ (SEQ ID NO: 15) and the nucleotide sequence of the antisense strand differs by no more than 3 bases from the nucleotide sequence 5′-VPusUfsuadCu(Tgn)uccuucUfgCfucgaasasu-3′ (SEQ ID NO: 16), wherein VP is a 5′-vinyl phosphonate; (Chd) is 2′-O-hexadecyl-cytidine-3′-phosphate; (Tgn) is thymidine-glycol nucleic acid (GNA), S-Isomer; s is a phosphorothioate linkage; a, g, c and u are 2′-O-methyl (2′-OMe) A, G, C, and U; dC is 2′-deoxy C; and Af, Cf, Gf, and Uf are 2′-deoxy-2′-fluoro (2′-F) A, C, G, and U;
[0023] d) the nucleotide sequence of the sense strand differs by no more than 3 bases from the nucleotide sequence 5′-gsasaag(Uhd)aaUfGfGfaccagugasasa-3′ (SEQ ID NO: 17) and the nucleotide sequence of the antisense strand differs by no more than 3 bases from the nucleotide sequence 5′-VPusUfsucdAc(Tgn)gguccaUfuAfcuuucscsu-3′ (SEQ ID NO: 18), wherein VP is a 5′-vinyl phosphonate; (Uhd) is 2′-O-hexadecyl-uridine-3′-phosphate; (Tgn) is thymidine-glycol nucleic acid (GNA), S-Isomer; s is a phosphorothioate linkage; a, g, c and u are 2′-O-methyl (2′-OMe) A, G, C, and U; dA is 2′-deoxy A; and Af, Gf, and Uf are 2′-deoxy-2′-fluoro (2′-F) A, G, and U;
[0024] e) the nucleotide sequence of the sense strand differs by no more than 3 bases from the nucleotide sequence 5′-asgsga(Uhd)gaaGfAfGfaggcaugususa-3′ (SEQ ID NO: 19) and the nucleotide sequence of the antisense strand differs by no more than 3 bases from the nucleotide sequence 5′-VPusAfsacdAu(G2p)ccucucUfuCfauccususu-3′ (SEQ ID NO: 20), wherein VP is a 5′-vinyl phosphonate; (Uhd) is 2′-O-hexadecyl-uridine-3′-phosphate; (G2p) is guanosine-2′-phosphate; s is a phosphorothioate linkage; a, g, c and u are 2′-O-methyl (2′-OMe) A, G, C, and U; dA is 2′-deoxy A; and Af, Cf, Gf, and Uf are 2′-deoxy-2′-fluoro (2′-F) A, C, G, and U; f) the nucleotide sequence of the sense strand differs by no more than 3 bases from the nucleotide sequence 5′-asasgga(Ahd)agUfAfAfuggaccagsusa-3′ (SEQ ID NO: 21) and the nucleotide sequence of the antisense strand differs by no more than 3 bases from the nucleotide sequence 5′-VPusdAscudGg(Tgn)ccaudTaCfuuuccuuscsu-3′ (SEQ ID NO: 22), wherein VP is a 5′-vinyl phosphonate; (Ahd) is 2′-O-hexadecyl-adenosine-3′-phosphate; (Tgn) is thymidine-glycol nucleic acid (GNA), S-Isomer; s is a phosphorothioate linkage; a, g, c and u are 2′-O-methyl (2′-OMe) A, G, C, and U; dA, dG, and dT are 2′-deoxy A, G, and T; and Af, Cf, and Uf are 2′-deoxy-2′-fluoro (2′-F) A, C, and U;
[0025] g) the nucleotide sequence of the sense strand differs by no more than 3 bases from the nucleotide sequence 5′-asuscaa(Uhd)uuCfGfAfgcagaaggsasa-3′ (SEQ ID NO: 23) and the nucleotide sequence of the antisense strand differs by no more than 3 bases from the nucleotide sequence 5′-VPusUfsccdTu(C2p)ugcucgAfaAfuugausgsg-3′ (SEQ ID NO: 24), wherein VP is a 5′-vinyl phosphonate; (Uhd) is 2′-O-hexadecyl-uridine-3′-phosphate; (C2p) is cytidine-2′-phosphate; s is a phosphorothioate linkage; a, g, c and u are 2′-O-methyl (2′-OMe) A, G, C, and U; dT is 2′-deoxy T; and Af, Cf, Gf, and Uf are 2′-deoxy-2′-fluoro (2′-F) A, C, G, and U;
[0026] h) the nucleotide sequence of the sense strand differs by no more than 3 bases from the nucleotide sequence 5′-cscsuca(Chd)uuUfAfAfuccucuauscsa-3′ (SEQ ID NO: 25) and the nucleotide sequence of the antisense strand differs by no more than 3 bases from the nucleotide sequence 5′-VPusdGsaudAg(Agn)ggaudTaAfagugaggsasc-3′ (SEQ ID NO: 26), wherein VP is a 5′-vinyl phosphonate; (Chd) is 2′-O-hexadecyl-cytidine-3′-phosphate; (Agn) is adenosine-glycol nucleic acid (GNA), S-isomer; s is a phosphorothioate linkage; a, g, c and u are 2′-O-methyl (2′-OMe) A, G, C, and U; dA, dG, and dT are 2′-deoxy A, G, and T; and Af and Uf are 2′-deoxy-2′-fluoro (2′-F) A and U;
[0027] i) the nucleotide sequence of the sense strand differs by no more than 3 bases from the nucleotide sequence 5′-asasgga(Uhd)gaAfGfAfgaggcaugsusa-3′ (SEQ ID NO: 27) and the nucleotide sequence of the antisense strand differs by no more than 3 bases from the nucleotide sequence 5′-VPusAfscadTg(C2p)cucucuUfcAfuccuususg-3′ (SEQ ID NO: 28), wherein VP is a 5′-vinyl phosphonate; (Uhd) is 2′-O-hexadecyl-uridine-3′-phosphate; (C2p) is cytidine-2′-phosphate; s is a phosphorothioate linkage; a, g, c and u are 2′-O-methyl (2′-OMe) A, G, C, and U; dT is 2′-deoxy T; and Af, Gf, and Uf are 2′-deoxy-2′-fluoro (2′-F) A, G, and U; or
[0028] j) the nucleotide sequence of the sense strand differs by no more than 3 bases from the nucleotide sequence 5′-asasuuu(Chd)gaGfCfAfgaaggaaasgsa-3′ (SEQ ID NO: 29) and the nucleotide sequence of the antisense strand differs by no more than 3 bases from the nucleotide sequence 5′-VPusCfsuudTc(C2p)uucugcUfcGfaaauusgsg-3′ (SEQ ID NO: 30), wherein VP is a 5′-vinyl phosphonate; (Chd) is 2′-O-hexadecyl-cytidine-3′-phosphate; (C2p) is cytidine-2′-phosphate; s is a phosphorothioate linkage; a, g, c and u are 2′-O-methyl (2′-OMe) A, G, C, and U; dT is 2′-deoxy T; and Af, Cf, Gf, and Uf are 2′-deoxy-2′-fluoro (2′-F) A, C, G, and U.

[0029] In one embodiment,
[0030] a) the nucleotide sequence of the sense strand differs by no more than 2 bases from the nucleotide sequence 5′-csascuu(Uhd)aaUfCfCfucuauccasgsa-3′ (SEQ ID NO: 11) and the nucleotide sequence of the antisense strand differs by no more than 2 bases from the nucleotide sequence 5′-VPusdCsugdGadTagagdGaUfuaaagugsasg-3′ (SEQ ID NO: 12), wherein VP is a 5′-vinyl phosphonate; (Uhd) is 2′-O-hexadecyl-uridine-3′-phosphate; s is a phosphorothioate linkage; a, g, c and u are 2′-O-methyl (2′-OMe) A, G, C, and U; dC, dG, and dT are 2′-deoxy C, G, and T; and Cf and Uf are 2′-deoxy-2′-fluoro (2′-F) C and U;
[0031] b) the nucleotide sequence of the sense strand differs by no more than 2 bases from the nucleotide sequence 5′-csasggu(Chd)cuCfAfCfuuuaauccsusa-3′ (SEQ ID NO: 13) and the nucleotide sequence of the antisense strand differs by no more than 2 bases from the nucleotide sequence 5′-VPusdAsggdAudTaaagdTgAfggaccugscsg-3′ (SEQ ID NO: 14), wherein VP is a 5′-vinyl phosphonate; (Chd) is 2′-O-hexadecyl-cytidine-3′-phosphate; s is a phosphorothioate linkage; a, g, c and u are 2′-O-methyl (2′-OMe) A, G, C, and U; dA and dT are 2′-deoxy A and T; and Af and Cf are 2′-deoxy-2′-fluoro (2′-F) A and C;
[0032] c) the nucleotide sequence of the sense strand differs by no more than 2 bases from the nucleotide sequence 5′-ususcgag(Chd)aGfAfAfggaaaguasasa-3′ (SEQ ID NO: 15) and the nucleotide sequence of the antisense strand differs by no more than 2 bases from the nucleotide sequence 5′-VPusUfsuadCu(Tgn)uccuucUfgCfucgaasasu-3′ (SEQ ID NO: 16), wherein VP is a 5′-vinyl phosphonate; (Chd) is 2′-O-hexadecyl-cytidine-3′-phosphate; (Tgn) is thymidine-glycol nucleic acid (GNA), S-Isomer; s is a phosphorothioate linkage; a, g, c and u are 2′-O-methyl (2′-OMe) A, G, C, and U; dC is 2′-deoxy C; and Af, Cf, Gf, and Uf are 2′-deoxy-2′-fluoro (2′-F) A, C, G, and U;
[0033] d) the nucleotide sequence of the sense strand differs by no more than 2 bases from the nucleotide sequence 5′-gsasaag(Uhd)aaUfGfGfaccagugasasa-3′ (SEQ ID NO: 17) and the nucleotide sequence of the antisense strand differs by no more than 2 bases from the nucleotide sequence 5′-VPusUfsucdAc(Tgn)gguccaUfuAfcuuucscsu-3′ (SEQ ID NO: 18), wherein VP is a 5′-vinyl phosphonate; (Uhd) is 2′-O-hexadecyl-uridine-3′-phosphate; (Tgn) is thymidine-glycol nucleic acid (GNA), S-Isomer; s is a phosphorothioate linkage; a, g, c and u are 2′-O-methyl (2′-OMe) A, G, C, and U; dA is 2′-deoxy A; and Af, Gf, and Uf are 2′-deoxy-2′-fluoro (2′-F) A, G, and U;
[0034] e) the nucleotide sequence of the sense strand differs by no more than 2 bases from the nucleotide sequence 5′-asgsga(Uhd)gaaGfAfGfaggcaugususa-3′ (SEQ ID NO: 19) and the nucleotide sequence of the antisense strand differs by no more than 2 bases from the nucleotide sequence 5′-VPusAfsacdAu(G2p)ccucucUfuCfauccususu-3′ (SEQ ID NO: 20), wherein VP is a 5′-vinyl phosphonate; (Uhd) is 2′-O-hexadecyl-uridine-3′-phosphate; (G2p) is guanosine-2′-phosphate; s is a phosphorothioate linkage; a, g, c and u are 2′-O-methyl (2′-OMe) A, G, C, and U; dA is 2′-deoxy A; and Af, Cf, Gf, and Uf are 2′-deoxy-2′-fluoro (2′-F) A, C, G, and U;
[0035] f) the nucleotide sequence of the sense strand differs by no more than 2 bases from the nucleotide sequence 5′-asasgga(Ahd)agUfAfAfuggaccagsusa-3′ (SEQ ID NO: 21) and the nucleotide sequence of the antisense strand differs by no more than 2 bases from the nucleotide sequence 5′-VPusdAscudGg(Tgn)ccaudTaCfuuuccuuscsu-3′ (SEQ ID NO: 22), wherein VP is a 5′-vinyl phosphonate; (Ahd) is 2′-O-hexadecyl-adenosine-3′-phosphate; (Tgn) is thymidine-glycol nucleic acid (GNA), S-Isomer; s is a phosphorothioate linkage; a, g, c and u are 2′-O-methyl (2′-OMe) A, G, C, and U; dA, dG, and dT are 2′-deoxy A, G, and T; and Af, Cf, and Uf are 2′-deoxy-2′-fluoro (2′-F) A, C, and U;
[0036] g) the nucleotide sequence of the sense strand differs by no more than 2 bases from the nucleotide sequence 5′-asuscaa(Uhd)uuCfGfAfgcagaaggsasa-3′ (SEQ ID NO: 23) and the nucleotide sequence of the antisense strand differs by no more than 2 bases from the nucleotide sequence 5′-VPusUfsccdTu(C2p)ugcucgAfaAfuugausgsg-3′ (SEQ ID NO: 24), wherein VP is a 5′-vinyl phosphonate; (Uhd) is 2′-O-hexadecyl-uridine-3′-phosphate; (C2p) is cytidine-2′-phosphate; s is a phosphorothioate linkage; a, g, c and u are 2′-O-methyl (2′-OMe) A, G, C, and U; dT is 2′-deoxy T; and Af, Cf, Gf, and Uf are 2′-deoxy-2′-fluoro (2′-F) A, C, G, and U;
[0037] h) the nucleotide sequence of the sense strand differs by no more than 2 bases from the nucleotide sequence 5′-cscsuca(Chd)uuUfAfAfuccucuauscsa-3′ (SEQ ID NO: 25) and the nucleotide sequence of the antisense strand differs by no more than 2 bases from the nucleotide sequence 5′-VPusdGsaudAg(Agn)ggaudTaAfagugaggsasc-3′ (SEQ ID NO: 26), wherein VP is a 5′-vinyl phosphonate; (Chd) is 2′-O-hexadecyl-cytidine-3′-phosphate; (Agn) is adenosine-glycol nucleic acid (GNA), S-isomer; s is a phosphorothioate linkage; a, g, c and u are 2′-O-methyl (2′-OMe) A, G, C, and U; dA, dG, and dT are 2′-deoxy A, G, and T; and Af and Uf are 2′-deoxy-2′-fluoro (2′-F) A and U;
[0038] i) the nucleotide sequence of the sense strand differs by no more than 2 bases from the nucleotide sequence 5′-asasgga(Uhd)gaAfGfAfgaggcaugsusa-3′ (SEQ ID NO: 27) and the nucleotide sequence of the antisense strand differs by no more than 2 bases from the nucleotide sequence 5′-VPusAfscadTg(C2p)cucucuUfcAfuccuususg-3′ (SEQ ID NO: 28), wherein VP is a 5′-vinyl phosphonate; (Uhd) is 2′-O-hexadecyl-uridine-3′-phosphate; (C2p) is cytidine-2′-phosphate; s is a phosphorothioate linkage; a, g, c and u are 2′-O-methyl (2′-OMe) A, G, C, and U; dT is 2′-deoxy T; and Af, Gf, and Uf are 2′-deoxy-2′-fluoro (2′-F) A, G, and U; or
[0039] j) the nucleotide sequence of the sense strand differs by no more than 2 bases from the nucleotide sequence 5′-asasuuu(Chd)gaGfCfAfgaaggaaasgsa-3′ (SEQ ID NO: 29) and the nucleotide sequence of the antisense strand differs by no more than 2 bases from the nucleotide sequence 5′-VPusCfsuudTc(C2p)uucugcUfcGfaaauusgsg-3′ (SEQ ID NO: 30), wherein VP is a 5′-vinyl phosphonate; (Chd) is 2′-O-hexadecyl-cytidine-3′-phosphate; (C2p) is cytidine-2′-phosphate; s is a phosphorothioate linkage; a, g, c and u are 2′-O-methyl (2′-OMe) A, G, C, and U; dT is 2′-deoxy T; and Af, Cf, Gf, and Uf are 2′-deoxy-2′-fluoro (2′-F) A, C, G, and U.

[0040] In one embodiment,
[0041] a) the nucleotide sequence of the sense strand differs by no more than 1 base from the nucleotide sequence 5′-csascuu(Uhd)aaUfCfCfucuauccasgsa-3′ (SEQ ID NO: 11) and the nucleotide sequence of the antisense strand differs by no more than 1 base from the nucleotide sequence 5′-VPusdCsugdGadTagagdGaUfuaaagugsasg-3′ (SEQ ID NO: 12), wherein VP is a 5′-vinyl phosphonate; (Uhd) is 2′-O-hexadecyl-uridine-3′-phosphate; s is a phosphorothioate linkage; a, g, c and u are 2′-O-methyl (2′-OMe) A, G, C, and U; dC, dG, and dT are 2′-deoxy C, G, and T; and Cf and Uf are 2′-deoxy-2′-fluoro (2′-F) C and U;
[0042] b) the nucleotide sequence of the sense strand differs by no more than 1 base from the nucleotide sequence 5′-csasggu(Chd)cuCfAfCfuuuaauccsusa-3′ (SEQ ID NO: 13) and the nucleotide sequence of the antisense strand differs by no more than 1 base from the nucleotide sequence 5′-VPusdAsggdAudTaaagdTgAfggaccugscsg-3′ (SEQ ID NO: 14), wherein VP is a 5′-vinyl phosphonate; (Chd) is 2′-O-hexadecyl-cytidine-3′-phosphate; s is a phosphorothioate linkage; a, g, c and u are 2′-O-methyl (2′-OMe) A, G, C, and U; dA and dT are 2′-deoxy A and T; and Af and Cf are 2′-deoxy-2′-fluoro (2′-F) A and C;
[0043] c) the nucleotide sequence of the sense strand differs by no more than 1 base from the nucleotide sequence 5′-ususcgag(Chd)aGfAfAfggaaaguasasa-3′ (SEQ ID NO: 15) and the nucleotide sequence of the antisense strand differs by no more than 1 base from the nucleotide sequence 5′-VPusUfsuadCu(Tgn)uccuucUfgCfucgaasasu-3′ (SEQ ID NO: 16), wherein VP is a 5′-vinyl phosphonate; (Chd) is 2′-O-hexadecyl-cytidine-3′-phosphate; (Tgn) is thymidine-glycol nucleic acid (GNA), S-Isomer; s is a phosphorothioate linkage; a, g, c and u are 2′-O-methyl (2′-OMe) A, G, C, and U; dC is 2′-deoxy C; and Af, Cf, Gf, and Uf are 2′-deoxy-2′-fluoro (2′-F) A, C, G, and U;
[0044] d) the nucleotide sequence of the sense strand differs by no more than 1 base from the nucleotide sequence 5′-gsasaag(Uhd)aaUfGfGfaccagugasasa-3′ (SEQ ID NO: 17) and the nucleotide sequence of the antisense strand differs by no more than 1 base from the nucleotide sequence 5′-VPusUfsucdAc(Tgn)gguccaUfuAfcuuucscsu-3′ (SEQ ID NO: 18), wherein VP is a 5′-vinyl phosphonate; (Uhd) is 2′-O-hexadecyl-uridine-3′-phosphate; (Tgn) is thymidine-glycol nucleic acid (GNA), S-Isomer;
[0045] s is a phosphorothioate linkage; a, g, c and u are 2′-O-methyl (2′-OMe) A, G, C, and U; dA is 2′-deoxy A; and Af, Gf, and Uf are 2′-deoxy-2′-fluoro (2′-F) A, G, and U;
[0046] e) the nucleotide sequence of the sense strand differs by no more than 1 base from the nucleotide sequence 5′-asgsga(Uhd)gaaGfAfGfaggcaugususa-3′ (SEQ ID NO: 19) and the nucleotide sequence of the antisense strand differs by no more than 1 base from the nucleotide sequence 5′-VPusAfsacdAu(G2p)ccucucUfuCfauccususu-3′ (SEQ ID NO: 20), wherein VP is a 5′-vinyl phosphonate; (Uhd) is 2′-O-hexadecyl-uridine-3′-phosphate; (G2p) is guanosine-2′-phosphate; s is a phosphorothioate linkage; a, g, c and u are 2′-O-methyl (2′-OMe) A, G, C, and U; dA is 2′-deoxy A; and Af, Cf, Gf, and Uf are 2′-deoxy-2′-fluoro (2′-F) A, C, G, and U;
[0047] f) the nucleotide sequence of the sense strand differs by no more than 1 base from the nucleotide sequence 5′-asasgga(Ahd)agUfAfAfuggaccagsusa-3′ (SEQ ID NO: 21) and the nucleotide sequence of the antisense strand differs by no more than 1 base from the nucleotide sequence 5′-VPusdAscudGg(Tgn)ccaudTaCfuuuccuuscsu-3′ (SEQ ID NO: 22), wherein VP is a 5′-vinyl phosphonate; (Ahd) is 2′-O-hexadecyl-adenosine-3′-phosphate; (Tgn) is thymidine-glycol nucleic acid (GNA), S-Isomer; s is a phosphorothioate linkage; a, g, c and u are 2′-O-methyl (2′-OMe) A, G, C, and U; dA, dG, and dT are 2′-deoxy A, G, and T; and Af, Cf, and Uf are 2′-deoxy-2′-fluoro (2′-F) A, C, and U;
[0048] g) the nucleotide sequence of the sense strand differs by no more than 1 base from the nucleotide sequence 5′-asuscaa(Uhd)uuCfGfAfgcagaaggsasa-3′ (SEQ ID NO: 23) and the nucleotide sequence of the antisense strand differs by no more than 1 base from the nucleotide sequence 5′-VPusUfsccdTu(C2p)ugcucgAfaAfuugausgsg-3′ (SEQ ID NO: 24), wherein VP is a 5′-vinyl phosphonate; (Uhd) is 2′-O-hexadecyl-uridine-3′-phosphate; (C2p) is cytidine-2′-phosphate; s is a phosphorothioate linkage; a, g, c and u are 2′-O-methyl (2′-OMe) A, G, C, and U; dT is 2′-deoxy T; and Af, Cf, Gf, and Uf are 2′-deoxy-2′-fluoro (2′-F) A, C, G, and U;
[0049] h) the nucleotide sequence of the sense strand differs by no more than 1 base from the nucleotide sequence 5′-cscsuca(Chd)uuUfAfAfuccucuauscsa-3′ (SEQ ID NO: 25) and the nucleotide sequence of the antisense strand differs by no more than 1 base from the nucleotide sequence 5′-VPusdGsaudAg(Agn)ggaudTaAfagugaggsasc-3′ (SEQ ID NO: 26), wherein VP is a 5′-vinyl phosphonate; (Chd) is 2′-O-hexadecyl-cytidine-3′-phosphate; (Agn) is adenosine-glycol nucleic acid (GNA), S-isomer; s is a phosphorothioate linkage; a, g, c and u are 2′-O-methyl (2′-OMe) A, G, C, and U; dA, dG, and dT are 2′-deoxy A, G, and T; and Af and Uf are 2′-deoxy-2′-fluoro (2′-F) A and U;
[0050] i) the nucleotide sequence of the sense strand differs by no more than 1 base from the nucleotide sequence 5′-asasgga(Uhd)gaAfGfAfgaggcaugsusa-3′ (SEQ ID NO: 27) and the nucleotide sequence of the antisense strand differs by no more than 1 base from the nucleotide sequence 5′-VPusAfscadTg(C2p)cucucuUfcAfuccuususg-3′ (SEQ ID NO: 28), wherein VP is a 5′-vinyl phosphonate; (Uhd) is 2′-O-hexadecyl-uridine-3′-phosphate; (C2p) is cytidine-2′-phosphate; s is a phosphorothioate linkage; a, g, c and u are 2′-O-methyl (2′-OMe) A, G, C, and U; dT is 2′-deoxy T; and Af, Gf, and Uf are 2′-deoxy-2′-fluoro (2′-F) A, G, and U; or
[0051] j) the nucleotide sequence of the sense strand differs by no more than 1 base from the nucleotide sequence 5′-asasuuu(Chd)gaGfCfAfgaaggaaasgsa-3′ (SEQ ID NO: 29) and the nucleotide sequence of the antisense strand differs by no more than 1 base from the nucleotide sequence 5′-VPusCfsuudTc(C2p)uucugcUfcGfaaauusgsg-3′ (SEQ ID NO: 30), wherein VP is a 5′-vinyl phosphonate; (Chd) is 2′-O-hexadecyl-cytidine-3′-phosphate; (C2p) is cytidine-2′-phosphate; s is a phosphorothioate linkage; a, g, c and u are 2′-O-methyl (2′-OMe) A, G, C, and U; dT is 2′-deoxy T; and Af, Cf, Gf, and Uf are 2′-deoxy-2′-fluoro (2′-F) A, C, G, and U.

[0052] In one embodiment,
[0053] a) the nucleotide sequence of the sense strand comprises the nucleotide sequence 5′-csascuu(Uhd)aaUfCfCfucuauccasgsa-3′ (SEQ ID NO: 11) and the nucleotide sequence of the antisense strand comprises the nucleotide sequence 5′-VPusdCsugdGadTagagdGaUfuaaagugsasg-3′ (SEQ ID NO: 12), wherein
[0054] VP is a 5′-vinyl phosphonate; (Uhd) is 2′-O-hexadecyl-uridine-3′-phosphate; s is a phosphorothioate linkage; a, g, c and u are 2′-O-methyl (2′-OMe) A, G, C, and U; dC, dG, and dT are 2′-deoxy C, G, and T; and Cf and Uf are 2′-deoxy-2′-fluoro (2′-F) C and U;
[0055] b) the nucleotide sequence of the sense strand comprises the nucleotide sequence 5′-csasggu(Chd)cuCfAfCfuuuaauccsusa-3′ (SEQ ID NO: 13) and the nucleotide sequence of the antisense strand comprises the nucleotide sequence 5′-VPusdAsggdAudTaaagdTgAfggaccugscsg-3′ (SEQ ID NO: 14), wherein VP is a 5′-vinyl phosphonate; (Chd) is 2′-O-hexadecyl-cytidine-3′-phosphate; s is a phosphorothioate linkage; a, g, c and u are 2′-O-methyl (2′-OMe) A, G, C, and U; dA and dT are 2′-deoxy A and T; and Af and Cf are 2′-deoxy-2′-fluoro (2′-F) A and C;
[0056] c) the nucleotide sequence of the sense strand comprises the nucleotide sequence 5′-ususcgag(Chd)aGfAfAfggaaaguasasa-3′ (SEQ ID NO: 15) and the nucleotide sequence of the antisense strand comprises the nucleotide sequence 5′-VPusUfsuadCu(Tgn)uccuucUfgCfucgaasasu-3′ (SEQ ID NO: 16), wherein VP is a 5′-vinyl phosphonate; (Chd) is 2′-O-hexadecyl-cytidine-3′-phosphate; (Tgn) is thymidine-glycol nucleic acid (GNA), S-Isomer; s is a phosphorothioate linkage; a, g, c and u are 2′-O-methyl (2′-OMe) A, G, C, and U; dC is 2′-deoxy C; and Af, Cf, Gf, and Uf are 2′-deoxy-2′-fluoro (2′-F) A, C, G, and U;
[0057] d) the nucleotide sequence of the sense strand comprises the nucleotide sequence 5′-gsasaag(Uhd)aaUfGfGfaccagugasasa-3′ (SEQ ID NO: 17) and the nucleotide sequence of the antisense strand comprises the nucleotide sequence 5′-VPusUfsucdAc(Tgn)gguccaUfuAfcuuucscsu-3′ (SEQ ID NO: 18), wherein VP is a 5′-vinyl phosphonate; (Uhd) is 2′-O-hexadecyl-uridine-3′-phosphate; (Tgn) is thymidine-glycol nucleic acid (GNA), S-Isomer; s is a phosphorothioate linkage; a, g, c and u are 2′-O-methyl (2′-OMe) A, G, C, and U; dA is 2′-deoxy A; and Af, Gf, and Uf are 2′-deoxy-2′-fluoro (2′-F) A, G, and U;
[0058] e) the nucleotide sequence of the sense strand comprises the nucleotide sequence 5′-asgsga(Uhd)gaaGfAfGfaggcaugususa-3′ (SEQ ID NO: 19) and the nucleotide sequence of the antisense strand comprises the nucleotide sequence 5′-VPusAfsacdAu(G2p)ccucucUfuCfauccususu-3′ (SEQ ID NO: 20), wherein VP is a 5′-vinyl phosphonate; (Uhd) is 2′-O-hexadecyl-uridine-3′-phosphate; (G2p) is guanosine-2′-phosphate; s is a phosphorothioate linkage; a, g, c and u are 2′-O-methyl (2′-OMe) A, G, C, and U; dA is 2′-deoxy A; and Af, Cf, Gf, and Uf are 2′-deoxy-2′-fluoro (2′-F) A, C, G, and U;
[0059] f) the nucleotide sequence of the sense strand comprises the nucleotide sequence 5′-asasgga(Ahd)agUfAfAfuggaccagsusa-3′ (SEQ ID NO: 21) and the nucleotide sequence of the antisense strand comprises the nucleotide sequence 5′-VPusdAscudGg(Tgn)ccaudTaCfuuuccuuscsu-3′ (SEQ ID NO: 22), wherein VP is a 5′-vinyl phosphonate; (Ahd) is 2′-O-hexadecyl-adenosine-3′-phosphate; (Tgn) is thymidine-glycol nucleic acid (GNA), S-Isomer; s is a phosphorothioate linkage; a, g, c and u are 2′-O-methyl (2′-OMe) A, G, C, and U; dA, dG, and dT are 2′-deoxy A, G, and T; and Af, Cf, and Uf are 2′-deoxy-2′-fluoro (2′-F) A, C, and U;
[0060] g) the nucleotide sequence of the sense strand comprises the nucleotide sequence 5′-asuscaa(Uhd)uuCfGfAfgcagaaggsasa-3′ (SEQ ID NO: 23) and the nucleotide sequence of the antisense strand comprises from the nucleotide sequence 5′-VPusUfsccdTu(C2p)ugcucgAfaAfuugausgsg-3′ (SEQ ID NO: 24), wherein VP is a 5′-vinyl phosphonate; (Uhd) is 2′-O-hexadecyl-uridine-3′-phosphate; (C2p) is cytidine-2′-phosphate; s is a phosphorothioate linkage; a, g, c and u are 2′-O-methyl (2′-OMe) A, G, C, and U; dT is 2′-deoxy T; and Af, Cf, Gf, and Uf are 2′-deoxy-2′-fluoro (2′-F) A, C, G, and U;
[0061] h) the nucleotide sequence of the sense strand comprises the nucleotide sequence 5′-cscsuca(Chd)uuUfAfAfuccucuauscsa-3′ (SEQ ID NO: 25) and the nucleotide sequence of the antisense strand comprises the nucleotide sequence 5′-VPusdGsaudAg(Agn)ggaudTaAfagugaggsasc-3′ (SEQ ID NO: 26), wherein VP is a 5′-vinyl phosphonate; (Chd) is 2′-O-hexadecyl-cytidine-3′-phosphate; (Agn) is adenosine-glycol nucleic acid (GNA), S-isomer; s is a phosphorothioate linkage; a, g, c and u are 2′-O-methyl (2′-OMe) A, G, C, and U; dA, dG, and dT are 2′-deoxy A, G, and T; and Af and Uf are 2′-deoxy-2′-fluoro (2′-F) A and U;
[0062] i) the nucleotide sequence of the sense strand comprises the nucleotide sequence 5′-asasgga(Uhd)gaAfGfAfgaggcaugsusa-3′ (SEQ ID NO: 27) and the nucleotide sequence of the antisense strand comprises the nucleotide sequence 5′-VPusAfscadTg(C2p)cucucuUfcAfuccuususg-3′ (SEQ ID NO: 28), wherein VP is a 5′-vinyl phosphonate; (Uhd) is 2′-O-hexadecyl-uridine-3′-phosphate; (C2p) is cytidine-2′-phosphate; s is a phosphorothioate linkage; a, g, c and u are 2′-O-methyl (2′-OMe) A, G, C, and U; dT is 2′-deoxy T; and Af, Gf, and Uf are 2′-deoxy-2′-fluoro (2′-F) A, G, and U; or
[0063] j) the nucleotide sequence of the sense strand comprises the nucleotide sequence 5′-asasuuu(Chd)gaGfCfAfgaaggaaasgsa-3′ (SEQ ID NO: 29) and the nucleotide sequence of the antisense strand comprises the nucleotide sequence 5′-VPusCfsuudTc(C2p)uucugcUfcGfaaauusgsg-3′ (SEQ ID NO: 30), wherein VP is a 5′-vinyl phosphonate; (Chd) is 2′-O-hexadecyl-cytidine-3′-phosphate; (C2p) is cytidine-2′-phosphate; s is a phosphorothioate linkage; a, g, c and u are 2′-O-methyl (2′-OMe) A, G, C, and U; dT is 2′-deoxy T; and Af, Cf, Gf, and Uf are 2′-deoxy-2′-fluoro (2′-F) A, C, G, and U.

[0064] In one embodiment,
[0065] a) the nucleotide sequence of the sense strand consists of the nucleotide sequence 5′-csascuu(Uhd)aaUfCfCfucuauccasgsa-3′ (SEQ ID NO: 11) and the nucleotide sequence of the antisense strand consists of the nucleotide sequence 5′-VPusdCsugdGadTagagdGaUfuaaagugsasg-3′ (SEQ ID NO: 12), wherein VP is a 5′-vinyl phosphonate; (Uhd) is 2′-O-hexadecyl-uridine-3′-phosphate; s is a phosphorothioate linkage; a, g, c and u are 2′-O-methyl (2′-OMe) A, G, C, and U; dC, dG, and dT are 2′-deoxy C, G, and T; and Cf and Uf are 2′-deoxy-2′-fluoro (2′-F) C and U;
[0066] b) the nucleotide sequence of the sense strand consists of the nucleotide sequence 5′-csasggu(Chd)cuCfAfCfuuuaauccsusa-3′ (SEQ ID NO: 13) and the nucleotide sequence of the antisense strand consists of the nucleotide sequence 5′-VPusdAsggdAudTaaagdTgAfggaccugscsg-3′ (SEQ ID NO: 14), wherein VP is a 5′-vinyl phosphonate; (Chd) is 2′-O-hexadecyl-cytidine-3′-phosphate; s is a phosphorothioate linkage; a, g, c and u are 2′-O-methyl (2′-OMe) A, G, C, and U; dA and dT are 2′-deoxy A and T; and Af and Cf are 2′-deoxy-2′-fluoro (2′-F) A and C;
[0067] c) the nucleotide sequence of the sense strand consists of the nucleotide sequence 5′-ususcgag(Chd)aGfAfAfggaaaguasasa-3′ (SEQ ID NO: 15) and the nucleotide sequence of the antisense strand consists of the nucleotide sequence 5′-VPusUfsuadCu(Tgn)uccuucUfgCfucgaasasu-3′ (SEQ ID NO: 16), wherein VP is a 5′-vinyl phosphonate; (Chd) is 2′-O-hexadecyl-cytidine-3′-phosphate; (Tgn) is thymidine-glycol nucleic acid (GNA), S-Isomer; s is a phosphorothioate linkage; a, g, c and u are 2′-O-methyl (2′-OMe) A, G, C, and U; dC is 2′-deoxy C; and Af, Cf, Gf, and Uf are 2′-deoxy-2′-fluoro (2′-F) A, C, G, and U;
[0068] d) the nucleotide sequence of the sense strand consists of the nucleotide sequence 5′-gsasaag(Uhd)aaUfGfGfaccagugasasa-3′ (SEQ ID NO: 17) and the nucleotide sequence of the antisense strand consists of the nucleotide sequence 5′-VPusUfsucdAc(Tgn)gguccaUfuAfcuuucscsu-3′ (SEQ ID NO: 18), wherein VP is a 5′-vinyl phosphonate; (Uhd) is 2′-O-hexadecyl-uridine-3′-phosphate; (Tgn) is thymidine-glycol nucleic acid (GNA), S-Isomer; s is a phosphorothioate linkage; a, g, c and u are 2′-O-methyl (2′-OMe) A, G, C, and U; dA is 2′-deoxy A; and Af, Gf, and Uf are 2′-deoxy-2′-fluoro (2′-F) A, G, and U;
[0069] e) the nucleotide sequence of the sense strand consists of the nucleotide sequence 5′-asgsga(Uhd)gaaGfAfGfaggcaugususa-3′ (SEQ ID NO: 19) and the nucleotide sequence of the antisense strand consists of the nucleotide sequence 5′-VPusAfsacdAu(G2p)ccucucUfuCfauccususu-3′ (SEQ ID NO: 20), wherein VP is a 5′-vinyl phosphonate; (Uhd) is 2′-O-hexadecyl-uridine-3′-phosphate; (G2p) is guanosine-2′-phosphate; s is a phosphorothioate linkage; a, g, c and u are 2′-O-methyl (2′-OMe) A, G, C, and U; dA is 2′-deoxy A; and Af, Cf, Gf, and Uf are 2′-deoxy-2′-fluoro (2′-F) A, C, G, and U;
[0070] f) the nucleotide sequence of the sense strand consists of the nucleotide sequence 5′-asasgga(Ahd)agUfAfAfuggaccagsusa-3′ (SEQ ID NO: 21) and the nucleotide sequence of the antisense strand consists of the nucleotide sequence 5′-VPusdAscudGg(Tgn)ccaudTaCfuuuccuuscsu-3′ (SEQ ID NO: 22), wherein VP is a 5′-vinyl phosphonate; (Ahd) is 2′-O-hexadecyl-adenosine-3′-phosphate; (Tgn) is thymidine-glycol nucleic acid (GNA), S-Isomer; s is a phosphorothioate linkage; a, g, c and u are 2′-O-methyl (2′-OMe) A, G, C, and U; dA, dG, and dT are 2′-deoxy A, G, and T; and Af, Cf, and Uf are 2′-deoxy-2′-fluoro (2′-F) A, C, and U;
[0071] g) the nucleotide sequence of the sense strand consists of the nucleotide sequence 5′-asuscaa(Uhd)uuCfGfAfgcagaaggsasa-3′ (SEQ ID NO: 23) and the nucleotide sequence of the antisense strand consists of from the nucleotide sequence 5′-VPusUfsccdTu(C2p)ugcucgAfaAfuugausgsg-3′ (SEQ ID NO: 24), wherein VP is a 5′-vinyl phosphonate; (Uhd) is 2′-O-hexadecyl-uridine-3′-phosphate; (C2p) is cytidine-2′-phosphate; s is a phosphorothioate linkage; a, g, c and u are 2′-O-methyl (2′-OMe) A, G, C, and U; dT is 2′-deoxy T; and Af, Cf, Gf, and Uf are 2′-deoxy-2′-fluoro (2′-F) A, C, G, and U;
[0072] h) the nucleotide sequence of the sense strand consists of the nucleotide sequence 5′-cscsuca(Chd)uuUfAfAfuccucuauscsa-3′ (SEQ ID NO: 25) and the nucleotide sequence of the antisense strand consists of the nucleotide sequence 5′-VPusdGsaudAg(Agn)ggaudTaAfagugaggsasc-3′ (SEQ ID NO: 26), wherein VP is a 5′-vinyl phosphonate; (Chd) is 2′-O-hexadecyl-cytidine-3′-phosphate; (Agn) is adenosine-glycol nucleic acid (GNA), S-isomer; s is a phosphorothioate linkage; a, g, c and u are 2′-O-methyl (2′-OMe) A, G, C, and U; dA, dG, and dT are 2′-deoxy A, G, and T; and Af and Uf are 2′-deoxy-2′-fluoro (2′-F) A and U;
[0073] i) the nucleotide sequence of the sense strand consists of the nucleotide sequence 5′-asasgga(Uhd)gaAfGfAfgaggcaugsusa-3′ (SEQ ID NO: 27) and the nucleotide sequence of the antisense strand consists of the nucleotide sequence 5′-VPusAfscadTg(C2p)cucucuUfcAfuccuususg-3′ (SEQ ID NO: 28), wherein VP is a 5′-vinyl phosphonate; (Uhd) is 2′-O-hexadecyl-uridine-3′-phosphate; (C2p) is cytidine-2′-phosphate; s is a phosphorothioate linkage; a, g, c and u are 2′-O-methyl (2′-OMe) A, G, C, and U; dT is 2′-deoxy T; and Af, Gf, and Uf are 2′-deoxy-2′-fluoro (2′-F) A, G, and U; or
[0074] j) the nucleotide sequence of the sense strand consists of the nucleotide sequence 5′-asasuuu(Chd)gaGfCfAfgaaggaaasgsa-3′ (SEQ ID NO: 29) and the nucleotide sequence of the antisense strand consists of the nucleotide sequence 5′-VPusCfsuudTc(C2p)uucugcUfcGfaaauusgsg-3′ (SEQ ID NO: 30), wherein VP is a 5′-vinyl phosphonate; (Chd) is 2′-O-hexadecyl-cytidine-3′-phosphate; (C2p) is cytidine-2′-phosphate; s is a phosphorothioate linkage; a, g, c and u are 2′-O-methyl (2′-OMe) A, G, C, and U; dT is 2′-deoxy T; and Af, Cf, Gf, and Uf are 2′-deoxy-2′-fluoro (2′-F) A, C, G, and U.

[0075] In one embodiment, the dsRNA agent is in the form of a sodium salt.

[0076] In one aspect, the present invention provides a double stranded ribonucleic acid (dsRNA) agent for inhibiting expression of superoxide dismutase 1 (SOD1), wherein the dsRNA agent comprises a sense strand and an antisense strand forming a double stranded region, wherein the sense strand comprises at least 15, e.g., 15, 16, 17, 18, 19, 20, or 21, contiguous nucleotides from any one of the nucleotide sequences of nucleotides 201-223, 204-226, 207-229, 216-238, 219-241, 328-350, 333-355, 336-358, 372-394, or 373-395 of SEQ ID NO: 1, and the antisense strand comprises at least 15, e.g., 15, 16, 17, 18, 19, 20, 21, 22, or 23, contiguous nucleotides from the corresponding nucleotide sequence of SEQ ID NO: 2, wherein (i) the dsRNA agent comprises at least one modified nucleotide, (ii) the double stranded region is 15-30 nucleotide pairs in length, and (iii) the sense strand or the antisense strand is conjugated to one or more lipophilic moieties.

[0077] In one embodiment, the sense strand comprises at least 15, e.g., 15, 16, 17, 18, 19, 20, or 21, contiguous nucleotides from any one of the nucleotide sequences of nucleotides 207-229, 219-241, 328-350, or 336-358 of SEQ ID NO: 1, and the antisense strand comprises at least 15, e.g., 15, 16, 17, 18, 19, 20, 21, 22, or 23, contiguous nucleotides from the corresponding nucleotide sequence of SEQ ID NO: 2.

[0078] In another embodiment, the sense strand comprises at least 15, e.g., 15, 16, 17, 18, 19, 20, or 21 contiguous nucleotides from any one of the nucleotide sequences of nucleotides 207-229, 328-350, or 336-358 of SEQ ID NO: 1, and the antisense strand comprises at least 15, e.g., 15, 16, 17, 18, 19, 20, 21, 22, or 23, contiguous nucleotides from the corresponding nucleotide sequence of SEQ ID NO: 2.

[0079] In one embodiment, the sense strand comprises at least 15, e.g., 15, 16, 17, 18, 19, 20, or 21, contiguous nucleotides from nucleotides 336-358 of SEQ ID NO: 1, and the antisense strand comprises at least 15, e.g., 15, 16, 17, 18, 19, 20, 21, 22, or 23, contiguous nucleotides from the corresponding nucleotide sequence of SEQ ID NO: 2.

[0080] In another embodiment, the antisense strand comprises at least 15, e.g., 15, 16, 17, 18, 19, 20, 21, 22, or 23, contiguous nucleotides from any one of the antisense strand nucleotide sequences of a duplex selected from the group consisting of AD-1395762, AD-1395756, AD-1395731, AD-1395743, AD-1395771, AD-1395738, AD-1395718, AD-1395760, AD-1395764, or AD-1395724.

[0081] In one embodiment, the antisense strand comprises at least 15, e.g., 15, 16, 17, 18, 19, 20, 21, 22, or 23, contiguous nucleotides from any one of the antisense strand nucleotide sequences of a duplex selected from the group consisting of AD-1395762, AD-1395756, AD-1395731, and AD-1395743.

[0082] In one embodiment, the antisense strand comprises at least 15, e.g., 15, 16, 17, 18, 19, 20, 21, 22, or 23, contiguous nucleotides from any one of the antisense strand nucleotide sequences of a duplex selected from the group consisting of AD-1395762, AD-1395756, and AD-1395731.

[0083] In another embodiment, the antisense strand comprises at least 15, e.g., 15, 16, 17, 18, 19, 20, 21, 22, or 23, contiguous nucleotides from the antisense strand nucleotide sequence of duplex AD-1395762.

[0084] In one embodiment, all of the nucleotides of the sense strand and all of the nucleotides of the antisense strand comprise a modification.

[0085] In one embodiment, at least one of the modified nucleotides is selected from the group a deoxy-nucleotide, a 3′-terminal deoxythimidine (dT) nucleotide, a 2′-O-methyl modified nucleotide, a 2′-fluoro modified nucleotide, a 2′-deoxy-modified nucleotide, a 2′-5′-linked ribonucleotide (3′-RNA), a locked nucleotide, an unlocked nucleotide, a conformationally restricted nucleotide, a constrained ethyl nucleotide, an abasic nucleotide, a 2′-amino-modified nucleotide, a 2′-O-allyl-modified nucleotide, 2′-C-alkyl-modified nucleotide, a 2′-methoxyethyl modified nucleotide, a 2′-O-alkyl-modified nucleotide, a morpholino nucleotide, a phosphoramidate, a non-natural base comprising nucleotide, a tetrahydropyran modified nucleotide, a 1,5-anhydrohexitol modified nucleotide, a cyclohexenyl modified nucleotide, a nucleotide comprising a 5′-phosphorothioate group, a nucleotide comprising a 5′-methylphosphonate group, a nucleotide comprising a 5′ phosphate or 5′ phosphate mimic, a nucleotide comprising vinyl phosphonate, a glycol nucleic acid (GNA), a glycol nucleic acid S-Isomer (S-GNA), a nucleotide comprising 2-hydroxymethyl-tetrahydrofuran-5-phosphate, a nucleotide comprising 2′-deoxythymidine-3′phosphate, a nucleotide comprising 2′-deoxyguanosine-3′-phosphate, and a terminal nucleotide linked to a cholesteryl derivative and a dodecanoic acid bisdecylamide group; and combinations thereof.

[0086] In one embodiment, the modified nucleotide is selected from the group consisting of a 2′-deoxy-2′-fluoro modified nucleotide, a 2′-deoxy-modified nucleotide, 3′-terminal deoxythimidine nucleotides (dT), a locked nucleotide, an abasic nucleotide, a 2′-amino-modified nucleotide, a 2′-alkyl-modified nucleotide, a morpholino nucleotide, a phosphoramidate, and a non-natural base comprising nucleotide.

[0087] In another embodiment, the modifications on the nucleotides are independently selected from the group consisting of 2′-deoxy, 2′-O-methyl, 3′-RNA, GNA, S-GNA, and 2′-deoxy-2′-fluoro modifications.

[0088] In one embodiment, the dsRNA agent further comprises at least one phosphorothioate internucleotide linkage.

[0089] In one embodiment, the dsRNA agent comprises 6-8 phosphorothioate internucleotide linkages.

[0090] In one embodiment, at least one strand comprises a 3′ overhang of at least 1 nucleotide.

[0091] In another embodiment, at least one strand comprises a 3′ overhang of 2 nucleotides.

[0092] In one embodiment, the double stranded region is 17-23 nucleotide pairs in length.

[0093] In another embodiment, the double stranded region is 19-21 nucleotide pairs in length.

[0094] In one embodiment, the double stranded region is 21-23 nucleotide pairs in length.

[0095] In one embodiment, each strand has 19-30 nucleotides.

[0096] In one embodiment, the one or more lipophilic moieties are conjugated to one or more internal positions on at least one strand.

[0097] In one embodiment, one lipophilic moiety is conjugated an internal position selected from the group consisting of positions 4-8 and 13-18 on the sense strand, and positions 6-10 and 15-18 on the antisense strand, counting from the 5′end of each strand.

[0098] In one embodiment, the internal position is selected from the group consisting of positions 5, 6, 7, 15, and 17 on the sense strand, counting from the 5′-end of the strand.

[0099] In another embodiment, the internal position is selected from the group consisting of positions 15 and 17 on the antisense strand, counting from the 5′-end of the strand.

[0100] In one embodiment, the internal position is selected from the group consisting of positions 6 and 7 of the sense strand.

[0101] In one embodiment, the lipophilic moiety is an aliphatic, alicyclic, or polyalicyclic compound.

[0102] In one embodiment, the lipophilic moiety contains a saturated or unsaturated C4-C30 hydrocarbon chain, and an optional functional group selected from the group consisting of hydroxyl, amine, carboxylic acid, sulfonate, phosphate, thiol, azide, and alkyne.

[0103] In one embodiment, the lipophilic moiety contains a saturated or unsaturated C6-C18 hydrocarbon chain.

[0104] In one embodiment, the lipophilic moiety contains a saturated or unsaturated C16 hydrocarbon chain.

[0105] In one embodiment, the saturated or unsaturated C16 hydrocarbon chain is conjugated to position 6 or 7 of the sense strand, counting from the 5′-end of the sense strand.

[0106] In one embodiment, the dsRNA agent further comprises a phosphate or phosphate mimic at the 5′-end of the antisense strand.

[0107] In one embodiment, the phosphate mimic is a 5′-vinyl phosphonate (VP).

[0108] In another embodiment, the phosphate mimic is a 5′-E-vinyl phosphonate (VP).

[0109] In one embodiment, the base pair at the 1 position of the 5′-end of the antisense strand of the duplex is an AU base pair.

[0110] In one embodiment, the sense strand has a total of 21 nucleotides and the antisense strand has a total of 23 nucleotides.

[0111] The present invention also provides cells and pharmaceutical compositions comprising a pharmaceutically acceptable diluent comprising the dsRNA agents disclosed herein.

[0112] In one aspect the present invention provides a method of inhibiting expression of a SOD1 gene in a cell. The method includes contacting the cell with a dsRNA agent or a pharmaceutical composition of the invention; and maintaining the cell produced in step (a) for a time sufficient to obtain degradation of the mRNA transcript of the SOD1 gene, thereby inhibiting expression of the SOD1 gene in the cell.

[0113] In one embodiment, the cell is within a human subject.

[0114] In one embodiment, the subject meets at least one diagnostic criterion for a SOD1-associated neurodegenerative disease or has been diagnosed with a SOD1-associated neurodegenerative disease.

[0115] In one embodiment, the SOD1-associated neurodegenerative disease is selected from the group consisting of Amyotrophic Lateral Sclerosis (ALS), Alzheimer's disease (AD), Parkinson's disease (PD), and Down's syndrome (DS).

[0116] In one aspect, the present invention provides a method of treating a subject diagnosed with a SOD1-associated neurodegenerative disease, the method comprising administering to the subject a therapeutically effective amount of a dsRNA agent or a pharmaceutical composition of the invention, thereby treating the subject.

[0117] In one embodiment, treating comprises amelioration of at least one sign or symptom of the disease.

[0118] In another embodiment, treating comprises prevention of progression of the disease.

[0119] In one embodiment, the SOD1-associated neurodegenerative disease is is selected from the group consisting of Amyotrophic Lateral Sclerosis (ALS), Alzheimer's disease (AD), Parkinson's disease (PD), and Down's syndrome (DS).

[0120] In another aspect, the present invention provides a method of preventing development of a SOD1-associated neurodegenerative disease in a subject meeting at least one diagnostic criterion for a SOD1-associated neurodegenerative disease, the method comprising administering to the subject a therapeutically effective amount of a dsRNA agent or a pharmaceutical composition of the invention, thereby preventing the development of a SOD1-associated neurodegenerative disease in the subject meeting at least one diagnostic criterion for a SOD1-associated neurodegenerative disease.

[0121] In one embodiment, the subject is human.

[0122] In one embodiment, the subject has been diagnosed with a SOD1-associated neurodegenerative disease.

[0123] In one embodiment, the SOD1-associated neurodegenerative disease is selected from the group consisting of Amyotrophic Lateral Sclerosis (ALS), Alzheimer's disease (AD), Parkinson's disease (PD), and Down's syndrome (DS).

[0124] In one embodiment, the dsRNA agent is administered to the subject intrathecally or intracerebroventricularly.

[0125] In one aspect, the instant disclosure provides a double stranded ribonucleic acid (RNAi) agent for inhibiting expression of a superoxide dismutase 1 (SOD1) gene, wherein the RNAi agent includes a sense strand and an antisense strand, and wherein the antisense strand includes a region of complementarity which includes at least 15, e.g., 15, 16, 17, 18, 19, 20, 21, 22, or 23, contiguous nucleotides differing by no more than 3 nucleotides (i.e., differing by 3, 2, 1, or 0 nucleotides) from any one of the antisense sequences listed in any one of Tables 2-7, 12, 13, and 18-20. In certain embodiments, the antisense strand includes a region of complementarity which includes at least 15, e.g., 15, 16, 17, 18, 19, 20, 21, 22, or 23, contiguous nucleotides of any one of the antisense sequences listed in any one of Tables 2-7, 12, 13, and 18-20. In certain embodiments, the antisense strand includes a region of complementarity which includes at least 19, e.g., 19, 20, 21, 22, or 23, contiguous nucleotides differing by no more than 3 nucleotides (i.e., differing by 3, 2, 1, or 0 nucleotides) from any one of the antisense sequences listed in any one of Tables 2-7, 12, 13, and 18-20. In certain embodiments, the antisense strand includes a region of complementarity which includes at least 19 e.g., 19, 20, 21, 22, or 23, contiguous nucleotides of any one of the antisense sequences listed in any one of Tables 2-7, 12, 13, and 18-20. In certain embodiments, thymine-to-uracil or uracil-to-thymine differences between aligned (compared) sequences are not counted as nucleotides that differ between the aligned (compared) sequences.

[0126] In some embodiments, the sense strand or the antisense strand is conjugated to one or more lipophilic moieties.

[0127] In some embodiments, the agents include one or more lipophilic moieties conjugated to one or more internal nucleotide positions, optionally via a linker or carrier.

[0128] In other embodiments, the agent further comprises a targeting ligand that targets a liver tissue, e.g., one or more GalNAc derivatives, optionally conjugated to the double stranded RNAi agent via a linker or carrier.

[0129] In yet other embodiments, the agents further comprise one or more lipophilic moieties conjugated to one or more internal nucleotide positions, optionally via a linker or carrier and a targeting ligand that targets a liver tissue, e.g., one or more GalNAc derivatives, optionally conjugated to the double stranded RNAi agent via a linker or carrier.

[0130] Another aspect of the instant disclosure provides a double stranded RNAi agent for inhibiting expression of a superoxide dismutase 1 (SOD1) gene, wherein the dsRNA agent includes a sense strand and an antisense strand, wherein the sense strand includes at least 15, e.g., 15, 16, 17, 18, 19, 20, or 21, contiguous nucleotides differing by no more than 3 nucleotides (i.e., differing by 3, 2, 1, or 0 nucleotides) from any one of the sense strand sequences presented in Tables 2-7, 12, 13, and 18-20; and wherein the antisense strand includes at least 15, e.g., 15, 16, 17, 18, 19, 20, 21, 22, or 23, contiguous nucleotides differing by no more than 3, e.g., 3, 2, 1, or 1, nucleotides from any one of antisense strand nucleotide sequences presented in Tables 2-7, 12, 13, and 18-20. In certain embodiments, the sense strand includes at least 15 e.g., 15, 16, 17, 18, 19, 20, or 21, contiguous nucleotides of any one of the sense strand sequences presented in Tables 2-7, 12, 13, and 18-20; and the antisense strand includes at least 15, e.g., 15, 16, 17, 18, 19, 20, 21, 22, or 23, contiguous nucleotides of any one of the antisense strand nucleotide sequences presented in Tables 2-7, 12, 13, and 18-20. In certain embodiments, the sense strand includes at least 19 e.g., 19, 20, or 21, contiguous nucleotides of any one of the sense strand sequences presented in Tables 2-7, 12, 13, and 18-20; and the antisense strand includes at least 19 e.g., 19, 20, 21, 22, or 23, contiguous nucleotides of any one of the antisense strand nucleotide sequences presented in Tables 2-7, 12, 13, and 18-20.

[0131] In some embodiments, the agents include one or more lipophilic moieties conjugated to one or more internal nucleotide positions, optionally via a linker or carrier.

[0132] In other embodiments, the agent further comprises a targeting ligand that targets a liver tissue, e.g., one or more GalNAc derivatives, optionally conjugated to the double stranded RNAi agent via a linker or carrier.

[0133] In yet other embodiments, the agents further comprise one or more lipophilic moieties conjugated to one or more internal nucleotide positions, optionally via a linker or carrier and a targeting ligand that targets a liver tissue, e.g., one or more GalNAc derivatives, optionally conjugated to the double stranded RNAi agent via a linker or carrier.

[0134] An additional aspect of the disclosure provides a double stranded RNAi agent for inhibiting expression of an superoxide dismutase 1 (SOD1) gene, wherein the dsRNA agent includes a sense strand and an antisense strand, wherein the sense strand includes at least 15 contiguous nucleotides differing by no more than 3 nucleotides (i.e., differing by 3, 2, 1, or 0 nucleotides) from any one of the nucleotide sequences of SEQ ID NOs: 1, 3, 5, 7, or 9, or a nucleotide sequence having at least 90% nucleotide sequence identity, e.g. 90, 91, 92, 93, 94, 95, 96, 97, 98, 99, or 100% identity, to the entire nucleotide sequence of any one of SEQ ID NOs: 1, 3, 5, 7, or 9, wherein a substitution of a uracil for any thymine of SEQ ID NOs: 1, 3, 5, 7, and 9 (when comparing aligned sequences) does not count as a difference that contributes to the differing by no more than 3 nucleotides (i.e., differing by 3, 2, 1, or 0 nucleotides) from any one of the nucleotide sequences of SEQ ID NOs: 1, 3, 5, 7, or 9, or the nucleotide sequence having at least 90% nucleotide sequence identity, e.g. 90, 91, 92, 93, 94, 95, 96, 97, 98, 99, or 100% identity, to the entire nucleotide sequence of any one of SEQ ID NOs: 1, 3, 5, 7, or 9; and wherein the antisense strand includes at least 15 contiguous nucleotides differing by no more than 3 nucleotides from any one of the nucleotide sequences of SEQ ID NOs: 2, 4, 6, 8, or 10, or a nucleotide sequence having at least 90% nucleotide sequence identity, e.g. 90, 91, 92, 93, 94, 95, 96, 97, 98, 99, or 100% identity, to the entire nucleotide sequence of any one of SEQ ID NOs: 2, 4, 6, 8, or 10, wherein a substitution of a uracil for any thymine of SEQ ID NOs: 2, 4, 6, 8, or 10 (when comparing aligned sequences) does not count as a difference that contributes to the differing by no more than 3 nucleotides from any one of the nucleotide sequences of SEQ ID NOs: 2, 4, 6, 8, or 10, or the nucleotide sequence having at least 90% nucleotide sequence identity, e.g. 90, 91, 92, 93, 94, 95, 96, 97, 98, 99, or 100% identity, to the entire nucleotide sequence of any one of SEQ ID NOs: 2, 4, 6, 8, or 10, wherein at least one of the sense strand and the antisense strand includes one or more lipophilic moieties conjugated to one or more internal nucleotide positions, optionally via a linker or carrier.

[0135] In one embodiment, the double stranded RNAi agent targeted to SOD1 comprises a sense strand which includes at least 15 e.g., 15, 16, 17, 18, 19, 20, or 21, contiguous nucleotides differing by no more than 3 nucleotides (i.e., differing by 3, 2, 1, or 0 nucleotides) from the nucleotide sequence of the sense strand nucleotide sequence of a duplex in Tables 2-7, 12, 13, and 18-20.

[0136] In one embodiment, the double stranded RNAi agent targeted to SOD1 comprises an antisense strand which includes at least 15 e.g., 15, 16, 17, 18, 19, 20, 21, 22, or 23, contiguous nucleotides differing by no more than 3 nucleotides (i.e., differing by 3, 2, 1, or 0 nucleotides) from the antisense nucleotide sequence of a duplex in one of Tables 2-7, 12, 13, and 18-20.

[0137] In some embodiments, the agent further comprises a targeting ligand that targets a liver tissue, e.g., one or more GalNAc derivatives, optionally conjugated to the double stranded RNAi agent via a linker or carrier.

[0138] Optionally, the double stranded RNAi agent includes at least one modified nucleotide.

[0139] In certain embodiments, the lipophilicity of the lipophilic moiety, measured by log K_{ow}, exceeds 0.

[0140] In some embodiments, the hydrophobicity of the double-stranded RNAi agent, measured by the unbound fraction in a plasma protein binding assay of the double-stranded RNAi agent, exceeds 0.2. In a related embodiment, the plasma protein binding assay is an electrophoretic mobility shift assay using human serum albumin protein.

[0141] In certain embodiments, substantially all of the nucleotides of the sense strand are modified nucleotides. Optionally, all of the nucleotides of the sense strand are modified nucleotides.

[0142] In some embodiments, substantially all of the nucleotides of the antisense strand are modified nucleotides. Optionally, all of the nucleotides of the antisense strand are modified nucleotides.

[0143] Optionally, all of the nucleotides of the sense strand and all of the nucleotides of the antisense strand are modified nucleotides.

[0144] In one embodiment, at least one of the modified nucleotides is a deoxy-nucleotide, a 3′-terminal deoxythimidine (dT) nucleotide, a 2′-O-methyl modified nucleotide, a 2′-fluoro modified nucleotide, a 2′-deoxy-modified nucleotide, a locked nucleotide, an unlocked nucleotide, a conformationally restricted nucleotide, a constrained ethyl nucleotide, an abasic nucleotide, a 2′-amino-modified nucleotide, a 2′-O-allyl-modified nucleotide, 2′-C-alkyl-modified nucleotide, 2′-hydroxyl-modified nucleotide, a 2′-methoxyethyl modified nucleotide, a 2′-O-alkyl-modified nucleotide, a morpholino nucleotide, a phosphoramidate, a non-natural base comprising nucleotide, a tetrahydropyran modified nucleotide, a 1,5-anhydrohexitol modified nucleotide, a cyclohexenyl modified nucleotide, a nucleotide comprising a 5′-phosphorothioate group, a nucleotide comprising a 5′-methylphosphonate group, a nucleotide comprising a 5′ phosphate or 5′ phosphate mimic, a nucleotide comprising vinyl phosphonate, a nucleotide comprising adenosine-glycol nucleic acid (GNA), a nucleotide comprising thymidine-glycol nucleic acid (GNA) S-Isomer, a nucleotide comprising 2-hydroxymethyl-tetrahydrofurane-5-phosphate, a nucleotide comprising 2′-deoxythymidine-3′phosphate, a nucleotide comprising 2′-deoxyguanosine-3′-phosphate, or a terminal nucleotide linked to a cholesteryl derivative or a dodecanoic acid bisdecylamide group.

[0145] In a related embodiment, the modified nucleotide is a 2′-deoxy-2′-fluoro modified nucleotide, a 2′-deoxy-modified nucleotide, 3′-terminal deoxythimidine nucleotides (dT), a locked nucleotide, an abasic nucleotide, a 2′-amino-modified nucleotide, a 2′-alkyl-modified nucleotide, a morpholino nucleotide, a phosphoramidate, or a non-natural base comprising nucleotide.

[0146] In one embodiment, the modified nucleotide includes a short sequence of 3′-terminal deoxythimidine nucleotides (dT).

[0147] In another embodiment, the modifications on the nucleotides are 2′-O-methyl, 2′fluoro, and GNA modifications.

[0148] In an additional embodiment, the double stranded RNAi agent includes at least one phosphorothioate internucleotide linkage. Optionally, the double stranded RNAi agent includes 6-8 (e.g., 6, 7, or 8) phosphorothioate internucleotide linkages.

[0149] In certain embodiments, the region of complementarity is at least 17 nucleotides in length. Optionally, the region of complementarity is 19-23 nucleotides in length. Optionally, the region of complementarity is 19 nucleotides in length.

[0150] In one embodiment, each strand is no more than 30 nucleotides in length.

[0151] In another embodiment, at least one strand includes a 3′ overhang of at least 1 nucleotide. Optionally, at least one strand includes a 3′ overhang of at least 2 nucleotides.

[0152] In certain embodiments, the double stranded RNAi agent further includes a lipophilic ligand, e.g., a C16 ligand, conjugated to the 3′ end of the sense strand through a monovalent or branched bivalent or trivalent linker. In certain embodiments, the double stranded RNAi agent further includes a lipophilic ligand, e.g., a C16 ligand, conjugated to an internal nucleotide positon, e.g., through a monovalent or branched bivalent or trivalent linker.

[0153] In certain embodiments, the ligand is a C16 ligand. In one embodiment, the ligand is conjugated at the 2′-position of a nucleotide or modified nucleotide within the sense or antisense strand. For example, a C16 ligand may be conjugated as shown in the following structure:

[chemical structure]

where * denotes a bond to an adjacent nucleotide, and B is a nucleobase or a nucleobase analog, optionally where B is adenine, guanine, cytosine, thymine or uracil.

[0154] In other embodiments, the agent further comprises a targeting ligand that targets a liver tissue, e.g., one or more GalNAc derivatives, optionally conjugated to the double stranded RNAi agent via a linker or carrier. In certain embodiments, one of the modified strands in Tables 3, 5, 7, 13, 18, and 20 are conjugated to a targeting ligand that targets a liver tissue. In certain embodiments, the targeting ligand is an L96 ligand, e.g., one or more GalNAc derivatives, optionally conjugated to the double stranded RNAi agent via a linker or carrier. In certain embodiments, the L96 ligand is conjugated to the end of one of the strands. In certain embodiments the L96 ligand is conjugated to the 3′ end of the sense strand.

[0155] In yet other embodiments, the agents further comprise a lipophilic ligand, e.g., a C16 ligand, conjugated to an internal nucleotide position, e.g., through a monovalent or branched bivalent or trivalent linker, and a targeting ligand that targets a liver tissue, e.g., one or more GalNAc derivatives conjugated to the 3′ end of the sense strand through a monovalent or branched bivalent or trivalent linker.

[0156] In yet other embodiments, the agents further comprise a lipophilic ligand, e.g., a C16 ligand, conjugated to the 3′ end of the sense strand through a monovalent or branched bivalent or trivalent linker and a targeting ligand that targets a liver tissue, e.g., one or more GalNAc derivatives conjugated to the 3′ end of the sense strand through a monovalent or branched bivalent or trivalent linker.

[0157] In another embodiment, the region of complementarity to SOD1 includes any one of the antisense sequences in any one of Tables 2-7, 12, 13, and 18-20.

[0158] In an additional embodiment, the region of complementarity to SOD1 is that of any one of the antisense sequences in any one of Tables 2-7, 12, 13, and 18-20. In some embodiments, the internal nucleotide positions include all positions except the terminal two positions from each end of the strand.

[0159] In a related embodiment, the internal positions include all positions except terminal three positions from each end of the strand. Optionally, the internal positions exclude the cleavage site region of the sense strand.

[0160] In some embodiments, the internal positions exclude positions 9-12, counting from the 5′-end of the sense strand. In certain embodiments, the sense strand is 21 nucleotides in length.

[0161] In other embodiments, the internal positions exclude positions 11-13, counting from the 3′-end of the sense strand. Optionally, the internal positions exclude the cleavage site region of the antisense strand. In certain embodiments, the sense strand is 21 nucleotides in length.

[0162] In some embodiments, the internal positions exclude positions 12-14, counting from the 5′-end of the antisense strand. In certain embodiments, the antisense strand is 23 nucleotides in length.

[0163] In another embodiment, the internal positions exclude positions 11-13 on the sense strand, counting from the 3′-end, and positions 12-14 on the antisense strand, counting from the 5′-end. In certain embodiments, the sense strand is 21 nucleotides in length and the antisense strand is 23 nucleotides in length.

[0164] In an additional embodiment, one or more lipophilic moieties are conjugated to one or more of the following internal positions: positions 4-8 and 13-18 on the sense strand, and positions 6-10 and 15-18 on the antisense strand, counting from the 5′end of each strand. Optionally, one or more lipophilic moieties are conjugated to one or more of the following internal positions: positions 5, 6, 7, 15, and 17 on the sense strand, and positions 15 and 17 on the antisense strand, counting from the 5′-end of each strand. In certain embodiments, the sense strand is 21 nucleotides in length and the antisense strand is 23 nucleotides in length.

[0165] In certain embodiments, the lipophilic moiety is an aliphatic, alicyclic, or polyalicyclic compound. Optionally, the lipophilic moiety is lipid, cholesterol, retinoic acid, cholic acid, adamantane acetic acid, 1-pyrene butyric acid, dihydrotestosterone, 1,3-bis-O(hexadecyl)glycerol, geranyloxyhexyanol, hexadecylglycerol, borneol, menthol, 1,3-propanediol, heptadecyl group, palmitic acid, myristic acid, 03-(oleoyl)lithocholic acid, 03-(oleoyl)cholenic acid, dimethoxytrityl, or phenoxazine.

[0166] In some embodiments, the lipophilic moiety contains a saturated or unsaturated C₄-C₃₀ hydrocarbon chain, and an optional functional group selected that is hydroxyl, amine, carboxylic acid, sulfonate, phosphate, thiol, azide, or alkyne.

[0167] In certain embodiments, the lipophilic moiety contains a saturated or unsaturated C₆-C₁₈ hydrocarbon chain. Optionally, the lipophilic moiety contains a saturated or unsaturated C₁₆ hydrocarbon chain. In a related embodiment, the lipophilic moiety is conjugated via a carrier that replaces one or more nucleotide(s) in the internal position(s). In certain embodiments, the carrier is a cyclic group that is pyrrolidinyl, pyrazolinyl, pyrazolidinyl, imidazolinyl, imidazolidinyl, piperidinyl, piperazinyl, [1,3]dioxolanyl, oxazolidinyl, isoxazolidinyl, morpholinyl, thiazolidinyl, isothiazolidinyl, quinoxalinyl, pyridazinonyl, tetrahydrofuranyl, or decalinyl; or is an acyclic moiety based on a serinol backbone or a diethanolamine backbone.

[0168] In some embodiments, the lipophilic moiety is conjugated to the double-stranded RNAi agent via a linker containing an ether, thioether, urea, carbonate, amine, amide, maleimide-thioether, disulfide, phosphodiester, sulfonamide linkage, a product of a click reaction, or carbamate.

[0169] In one embodiment, the lipophilic moiety is conjugated to a nucleobase, sugar moiety, or internucleosidic linkage.

[0170] In another embodiment, the double-stranded RNAi agent further includes a phosphate or phosphate mimic at the 5′-end of the antisense strand. Optionally, the phosphate mimic is a 5′-vinyl phosphonate (VP). When the phosphate mimic is a 5′-vinyl phosphonate (VP), the 5′-terminal nucleotide may have the following structure,

[chemical structure]

[0171] wherein X is O or S;
[0172] R is hydrogen, hydroxy, fluoro, or C₁₋₂₀alkoxy (e.g., methoxy or n-hexadecyloxy);
[0173] R^{5′} is ═C(H)—P(O)(OH)₂ and the double bond between the C5′ carbon and R5′ is in the E or Z orientation (e.g., E orientation); and
[0174] B is a nucleobase or a modified nucleobase, optionally where B is adenine, guanine, cytosine, thymine, or uracil.

[0175] In certain embodiments, the double-stranded RNAi agent further includes a targeting ligand that targets a receptor which mediates delivery to a CNS tissue, e.g., a hydrophilic ligand. In certain embodiments, the targeting ligand is a C16 ligand.

[0176] In some embodiments, the double-stranded RNAi agent further includes a targeting ligand that targets a brain tissue, e.g., striatum.

[0177] In some embodiments, the double-stranded RNAi agent further includes a targeting ligand that targets a liver tissue or cell type, e.g., hepatocytes.

[0178] In one embodiment, the lipophilic moeity or targeting ligand is conjugated via a bio-cleavable linker that is DNA, RNA, disulfide, amide, functionalized monosaccharides or oligosaccharides of galactosamine, glucosamine, glucose, galactose, mannose, or a combination thereof.

[0179] In a related embodiment, the 3′ end of the sense strand is protected via an end cap which is a cyclic group having an amine, the cyclic group being pyrrolidinyl, pyrazolinyl, pyrazolidinyl, imidazolinyl, imidazolidinyl, piperidinyl, piperazinyl, [1,3]dioxolanyl, oxazolidinyl, isoxazolidinyl, morpholinyl, thiazolidinyl, isothiazolidinyl, quinoxalinyl, pyridazinonyl, tetrahydrofuranyl, or decalinyl.

[0180] In one embodiment, the RNAi agent includes at least one modified nucleotide that is a 2′-O-methyl modified nucleotide, a 2′-fluoro modified nucleotide, a nucleotide that includes a glycol nucleic acid (GNA) or a nucleotide that includes a vinyl phosphonate. Optionally, the RNAi agent includes at least one of each of the following modifications: 2′-O-methyl modified nucleotide, a 2′-fluoro modified nucleotide, a nucleotide comprising a glycol nucleic acid (GNA) and a nucleotide comprising vinyl phosphonate.

[0181] In another embodiment, the RNAi agent includes a pattern of modified nucleotides as provided below in Tables 2-7, 12, 13, and 18-20 where locations of 2′-C16, 2′-O-methyl, GNA, phosphorothioate, and 2′-fluoro modifications, irrespective of the individual nucleotide base sequences of the displayed RNAi agents.

[0182] Another aspect of the instant disclosure provides a double stranded RNAi agent for inhibiting expression of a SOD1 gene, wherein the double stranded RNAi agent includes a sense strand complementary to an antisense strand, wherein the antisense strand includes a region complementary to part of an mRNA encoding SOD1, wherein each strand is about 14 to about 30 nucleotides in length, wherein the double stranded RNAi agent is represented by formula (III):

sense:5′nₚ-Nₐ-(XXX)ᵢ-N_{b}-YYY-N_{b}-(ZZZ)ⱼ-Nₐ-n_{q}3′

antisense: 3′nₚ′-Nₐ′-(X′X′X′)ₖ-N_{b}′-Y′Y′Y′-N_{b}′-(Z′Z′Z′)ₗ-Nₐ′-n_{q}′5′ (III)
[0183] wherein:
[0184] i, j, k, and l are each independently 0 or 1;
[0185] p, p′, q, and q′ are each independently 0-6;
[0186] each Nₐ and Nₐ′ independently represents an oligonucleotide sequence including 0-25 nucleotides which are either modified or unmodified or combinations thereof, each sequence including at least two differently modified nucleotides;
[0187] each N_{b} and N_{b}′ independently represents an oligonucleotide sequence including 0-10 nucleotides which are either modified or unmodified or combinations thereof;
[0188] each nₚ, nₚ′, n_{q}, and n_{q}′, each of which may or may not be present, independently represents an overhang nucleotide;
[0189] XXX, YYY, ZZZ, X′X′X′, Y′Y′Y′, and Z′Z′Z′ each independently represent one motif of three identical modifications on three consecutive nucleotides;
   modifications on N_{b} differ from the modification on Y and modifications on N_{b}′ differ from the modification on Y′; and
[0190] wherein the sense strand is conjugated to at least one ligand.

[0191] In one embodiment, i is 0; j is 0; i is 1; j is 1; both i and j are 0; or both i and j are 1.

[0192] In another embodiment, k is 0; l is 0; k is 1; l is 1; both k and l are 0; or both k and l are 1.

[0193] In certain embodiments, XXX is complementary to X′X′X′, YYY is complementary to Y′Y′Y′, and ZZZ is complementary to Z′Z′Z′.

[0194] In another embodiment, the YYY motif occurs at or near the cleavage site of the sense strand.

[0195] In an additional embodiment, the Y′Y′Y′ motif occurs at the 11, 12 and 13 positions of the antisense strand from the 5′-end. Optionally, the Y′ is 2′-O-methyl.

[0196] In some embodiments, formula (III) is represented by formula (IIIa):

sense: 5′nₚ-Nₐ-YYY-Nₐ-n_{q}3′

antisense: 3′n_{p′}-N_{a′}-Y′Y′Y′-N_{a′}-n_{q′}5′ (IIIa).

[0197] In another embodiment, formula (III) is represented by formula (IIIb):

sense: 5′nₚ-Nₐ-YYY-N_{b}-ZZZ-Nₐ-n_{q}3′

antisense: 3′n_{p′}-N_{a′}-Y′Y′Y′-N_{b′}-Z′Z′Z′-N_{a′}-n_{q′}5′ (IIIb)

[0198] wherein each N_{b} and N_{b}′ independently represents an oligonucleotide sequence including 1-5 modified nucleotides.

[0199] In an additional embodiment, formula (III) is represented by formula (IIIc):

sense: 5′nₚ-Nₐ-XXX-N_{b}-YYY-Nₐ-n_{q}3′

antisense: 3′n_{p′}-N_{a′}-X′X′X′-N_{b′}-Y′Y′Y′-N_{a′}-n_{q′}5′ (IIIc)

[0200] wherein each N_{b} and N_{b}′ independently represents an oligonucleotide sequence including 1-5 modified nucleotides.

[0201] In certain embodiments, formula (III) is represented by formula (IIId):

sense: 5′nₚ-Nₐ-XXX-N_{b}-YYY-N_{b}-ZZZ-Nₐ-n_{q}3′

antisense: 3′n_{p′}-N_{a′}-X′X′X′-N_{b′}-Y′Y′Y′-N_{b′}-Z′Z′Z′-N_{a′}-n_{q′}5′ (IIId)

[0202] wherein each N_{b} and N_{b}′ independently represents an oligonucleotide sequence including 1-5 modified nucleotides and each Nₐ and Nₐ′ independently represents an oligonucleotide sequence including 2-10 modified nucleotides.

[0203] In another embodiment, the double stranded region is 15-30 nucleotide pairs in length. Optionally, the double stranded region is 17-23 nucleotide pairs in length.

[0204] In certain embodiments, the double stranded region is 17-25 nucleotide pairs in length. Optionally, the double stranded region is 23-27 nucleotide pairs in length.

[0205] In some embodiments, the double stranded region is 19-21 nucleotide pairs in length. Optionally, the double stranded region is 21-23 nucleotide pairs in length.

[0206] In certain embodiments, each strand independently has 15-30 nucleotides. Optionally, each strand independently has 19-30 nucleotides. Optionally, each strand independently has 19-23 nucleotides.

[0207] In certain embodiments, the double stranded region is 19-21 nucleotide pairs in length and each strand has 19-23 nucleotides.

[0208] In another embodiment, the modifications on the nucleotides of the RNAi agent are LNA, glycol nucleic acid (GNA), hexitol nucleic acid (HNA), a cyclohexene nucleic acid (CeNA), 2′-methoxyethyl, 2′-O-alkyl, 2′-O-allyl, 2′-C-allyl, 2′-fluoro, 2′-deoxy or 2′-hydroxyl, and combinations thereof. Optionally, the modifications on nucleotides include 2′-O-methyl, 2′-fluoro, or GNA, and combinations thereof. In a related embodiment, the modifications on the nucleotides are 2′-O-methyl or 2′-fluoro modifications.

[0209] In one embodiment the RNAi agent includes a ligand that is or includes one or more lipophilic, e.g., C16, moieties attached through a bivalent or trivalent branched linker.

[0210] In other embodiments, the agent further comprises a targeting ligand that targets a liver tissue, e.g., one or more GalNAc derivatives.

[0211] In yet other embodiments, the agents further comprise a lipophilic ligand, e.g., a C16 ligand, conjugated to the 3′ end of the sense strand through a monovalent or branched bivalent or trivalent linker and a targeting ligand that targets a liver tissue, e.g., one or more GalNAc derivatives conjugated to the 3′ end of the sense strand through a monovalent or branched bivalent or trivalent linker.

[0212] In certain embodiments, the ligand is attached to the 3′ end of the sense strand.

[0213] In some embodiments, the RNAi agent further includes at least one phosphorothioate or methylphosphonate internucleotide linkage. In a related embodiment, the phosphorothioate or methylphosphonate internucleotide linkage is at the 3′-terminus of one strand. Optionally, the strand is the antisense strand. In another embodiment, the strand is the sense strand. In a related embodiment, the phosphorothioate or methylphosphonate internucleotide linkage is at the 5′-terminus of one strand. Optionally, the strand is the antisense strand. In another embodiment, the strand is the sense strand.

[0214] In another embodiment, the phosphorothioate or methylphosphonate internucleotide linkage is at the both the 5′- and 3′-terminus of one strand. Optionally, the strand is the antisense strand. In another embodiment, the strand is the sense strand.

[0215] In an additional embodiment, the base pair at the 1 position of the 5′-end of the antisense strand of the RNAi agent duplex is an A:U base pair.

[0216] In certain embodiments, the Y nucleotides contain a 2′-fluoro modification.

[0217] In some embodiments, the Y′ nucleotides contain a 2′-O-methyl modification.

[0218] In certain embodiments, p′>0. Optionally, p′=2.

[0219] In some embodiments, q′=0, p=0, q=0, and p′ overhang nucleotides are complementary to the target mRNA.

[0220] In certain embodiments, q′=0, p=0, q=0, and p′ overhang nucleotides are non-complementary to the target mRNA.

[0221] In one embodiment, the sense strand of the RNAi agent has a total of 21 nucleotides and the antisense strand has a total of 23 nucleotides.

[0222] In another embodiment, at least one nₚ′ is linked to a neighboring nucleotide via a phosphorothioate linkage. Optionally, all nₚ′ are linked to neighboring nucleotides via phosphorothioate linkages.

[0223] In certain embodiments, the SOD1 RNAi agent of the instant disclosure is one of those listed in Tables 2-7, 12, 13, and 18-20. In some embodiments, all of the nucleotides of the sense strand and all of the nucleotides of the antisense strand include a modification.

[0224] Another aspect of the instant disclosure provides a double stranded RNAi agent for inhibiting expression of a SOD1 gene in a cell, wherein the double stranded RNAi agent includes a sense strand complementary to an antisense strand, wherein the antisense strand includes a region complementary to part of an mRNA encoding a SOD1 gene, wherein each strand is about 14 to about 30 nucleotides in length, wherein the double stranded RNAi agent is represented by formula (III):

sense: 5′nₚ-Nₐ-(XXX)ᵢ-N_{b}-YYY-N_{b}-(ZZZ)ⱼ-Nₐ-n_{q}3′

antisense: 3′nₚ′-Nₐ′-(X′X′X′)ₖ-N_{b}′-Y′Y′Y′-N_{b}′-(Z′Z′Z′)ₗ-Nₐ′-n_{q}′5′ (III)

[0225] wherein:
[0226] i, j, k, and l are each independently 0 or 1;
[0227] p, p′, q, and q′ are each independently 0-6;
[0228] each Nₐ and Nₐ′ independently represents an oligonucleotide sequence including 0-25 nucleotides which are either modified or unmodified or combinations thereof, each sequence including at least two differently modified nucleotides;
[0229] each N_{b} and N_{b}′ independently represents an oligonucleotide sequence including 0-10 nucleotides which are either modified or unmodified or combinations thereof;
[0230] each nₚ, nₚ′, n_{q}, and n_{q}′, each of which may or may not be present independently represents an overhang nucleotide;
[0231] XXX, YYY, ZZZ, X′X′X′, Y′Y′Y′, and Z′Z′Z′ each independently represent one motif of three identical modifications on three consecutive nucleotides, and wherein the modifications are 2′-O-methyl or 2′-fluoro modifications;
[0232] modifications on N_{b} differ from the modification on Y and modifications on N_{b}′ differ from the modification on Y′; and
[0233] wherein the sense strand is conjugated to at least one ligand, optionally wherein the ligand is one or more lipophilic, e.g., C16, ligands, or one or more GalNAc derivatives.

[0234] An additional aspect of the instant disclosure provides a double stranded RNAi agent for inhibiting expression of a SOD1 gene in a cell, wherein the double stranded RNAi agent includes a sense strand complementary to an antisense strand, wherein the antisense strand includes a region complementary to part of an mRNA encoding SOD1, wherein each strand is about 14 to about 30 nucleotides in length, wherein the double stranded RNAi agent is represented by formula (III):

sense: 5′nₚ-Nₐ-(XXX)ᵢ-N_{b}-YYY-N_{b}-(ZZZ)ⱼ-Nₐ-n_{q}3′

antisense: 3′nₚ′-Nₐ′-(X′X′X′)ₖ-N_{b}′-Y′Y′Y′-N_{b}′-(Z′Z′Z′)ₗ-Nₐ′-n_{q}′5′ (III)

[0235] wherein:
[0236] i, j, k, and l are each independently 0 or 1;
[0237] each nₚ, n_{q}, and n_{q}′, each of which may or may not be present, independently represents an overhang nucleotide;
[0238] p, q, and q′ are each independently 0-6;
[0239] nₚ′>0 and at least one nₚ′ is linked to a neighboring nucleotide via a phosphorothioate linkage;
[0240] each Nₐ and Nₐ′ independently represents an oligonucleotide sequence including 0-25 nucleotides which are either modified or unmodified or combinations thereof, each sequence including at least two differently modified nucleotides;
[0241] each N_{b} and N_{b}′ independently represents an oligonucleotide sequence including 0-10 nucleotides which are either modified or unmodified or combinations thereof;
[0242] XXX, YYY, ZZZ, X′X′X′, Y′Y′Y′, and Z′Z′Z′ each independently represent one motif of three identical modifications on three consecutive nucleotides, and wherein the modifications are 2′-O-methyl, glycol nucleic acid (GNA) or 2′-fluoro modifications;
[0243] modifications on N_{b} differ from the modification on Y and modifications on N_{b}′ differ from the modification on Y′; and
[0244] wherein the sense strand is conjugated to at least one ligand, optionally where the ligand is one or more lipophilic, e.g., C16, ligands, or one or more GalNAc derivatives.

[0245] Another aspect of the instant disclosure provides a double stranded RNAi agent for inhibiting expression of a SOD1 gene in a cell, wherein the double stranded RNAi agent includes a sense strand complementary to an antisense strand, wherein the antisense strand includes a region complementary to part of an mRNA encoding SOD1 (SEQ ID NO: 1, or a nucleotide sequence having at least 90% nucleotide sequence identity, e.g. 90, 91, 92, 93, 94, 95, 96, 97, 98, 99 or 100% identity, to the entire nucleotide sequence of SEQ ID NO:1), wherein each strand is about 14 to about 30 nucleotides in length, wherein the double stranded RNAi agent is represented by formula (III):

sense: 5′nₚ-Nₐ-(XXX)ᵢ-N_{b}-YYY-N_{b}-(ZZZ)ⱼ-Nₐ-n_{q}3′

antisense: 3′nₚ′-Nₐ′-(X′X′X′)ₖ-N_{b}′-Y′Y′Y′-N_{b}′-(Z′Z′Z′)ₗ-Nₐ′-n_{q}′5′ (III)

[0246] wherein:
[0247] i, j, k, and l are each independently 0 or 1;
[0248] each nₚ, n_{q}, and n_{q}′, each of which may or may not be present, independently represents an overhang nucleotide;
[0249] p, q, and q′ are each independently 0-6;
[0250] nₚ′>0 and at least one nₚ′ is linked to a neighboring nucleotide via a phosphorothioate linkage;
[0251] each Nₐ and Nₐ′ independently represents an oligonucleotide sequence including 0-25 nucleotides which are either modified or unmodified or combinations thereof, each sequence including at least two differently modified nucleotides;
[0252] each N_{b} and N_{b}′ independently represents an oligonucleotide sequence including 0-10 nucleotides which are either modified or unmodified or combinations thereof;
[0253] XXX, YYY, ZZZ, X′X′X′, Y′Y′Y′, and Z′Z′Z′ each independently represent one motif of three identical modifications on three consecutive nucleotides, and wherein the modifications are 2′-O-methyl or 2′-fluoro modifications;
[0254] modifications on N_{b} differ from the modification on Y and modifications on N_{b}′ differ from the modification on Y′; and
[0255] wherein the sense strand is conjugated to at least one ligand, optionally wherein the ligand is one or more lipophilic, e.g., C16, ligands, or one or more GalNAc derivatives.

[0256] An additional aspect of the instant disclosure provides a double stranded RNAi agent for inhibiting expression of a SOD1 gene in a cell, wherein the double stranded RNAi agent includes a sense strand complementary to an antisense strand, wherein the antisense strand includes a region complementary to part of an mRNA encoding SOD1 (SEQ ID NO: 1, or a nucleotide sequence having at least 90% nucleotide sequence identity, e.g. 90, 91, 92, 93, 94, 95, 96, 97, 98, 99, or 100% identity, to the entire nucleotide sequence of SEQ ID NO: 1), wherein each strand is about 14 to about 30 nucleotides in length, wherein the double stranded RNAi agent is represented by formula (III):

sense: 5′nₚ-Nₐ-(XXX)ᵢ-N_{b}-YYY-N_{b}-(ZZZ)ⱼ-Nₐ-n_{q}3′

antisense: 3′nₚ′-Nₐ′-(X′X′X′)ₖ-N_{b}′-Y′Y′Y′-N_{b}′-(Z′Z′Z′)ₗ-Nₐ′-n_{q}′5′ (III)

[0257] wherein:
[0258] i, j, k, and l are each independently 0 or 1;
[0259] each nₚ, n_{q}, and n_{q}′, each of which may or may not be present, independently represents an overhang nucleotide;
[0260] p, q, and q′ are each independently 0-6;
[0261] nₚ′>0 and at least one nₚ′ is linked to a neighboring nucleotide via a phosphorothioate linkage;
[0262] each Nₐ and Nₐ′ independently represents an oligonucleotide sequence including 0-25 nucleotides which are either modified or unmodified or combinations thereof, each sequence including at least two differently modified nucleotides;
[0263] each N_{b} and N_{b}′ independently represents an oligonucleotide sequence including 0-10 nucleotides which are either modified or unmodified or combinations thereof;
[0264] XXX, YYY, ZZZ, X′X′X′, Y′Y′Y′, and Z′Z′Z′ each independently represent one motif of three identical modifications on three consecutive nucleotides, and wherein the modifications are 2′-O-methyl or 2′-fluoro modifications;
[0265] modifications on N_{b} differ from the modification on Y and modifications on N_{b}′ differ from the modification on Y′;
[0266] wherein the sense strand includes at least one phosphorothioate linkage; and
[0267] wherein the sense strand is conjugated to at least one ligand, optionally wherein the ligand is one or more lipophilic, e.g., C16, ligands or one or more GalNAc derivatives.

[0268] Another aspect of the instant disclosure provides a double stranded RNAi agent for inhibiting expression of a SOD1 gene in a cell, wherein the double stranded RNAi agent includes a sense strand complementary to an antisense strand, wherein the antisense strand includes a region complementary to part of an mRNA encoding SOD1 (SEQ ID NO: 1, or a nucleotide sequence having at least 90% nucleotide sequence identity, e.g. 90, 91, 92, 93, 94, 95, 96, 97, 98, 99, or 100% identity, to the entire nucleotide sequence of SEQ ID NO: 1), wherein each strand is about 14 to about 30 nucleotides in length, wherein the double stranded RNAi agent is represented by formula (III):

sense: 5′nₚ-Nₐ-YYY-Nₐ-n_{q}3′

antisense: 3′nₚ′-Nₐ′-Y′Y′Y′-Nₐ′-n_{q}′5′ (IIIa)

[0269] wherein:
[0270] each nₚ, n_{q}, and n_{q}′, each of which may or may not be present, independently represents an overhang nucleotide;
[0271] p, q, and q′ are each independently 0-6;
[0272] nₚ′>0 and at least one nₚ′ is linked to a neighboring nucleotide via a phosphorothioate linkage;
[0273] each Nₐ and Nₐ′ independently represents an oligonucleotide sequence including 0-25 nucleotides which are either modified or unmodified or combinations thereof, each sequence including at least two differently modified nucleotides;
[0274] YYY and Y′Y′Y′ each independently represent one motif of three identical modifications on three consecutive nucleotides, and wherein the modifications are 2′-O-methyl or 2′-fluoro modifications;
[0275] wherein the sense strand includes at least one phosphorothioate linkage; and
[0276] wherein the sense strand is conjugated to at least one ligand, optionally wherein the ligand is one or more lipophilic, e.g., C16 ligands, or one or more GalNAc derivatives.

[0277] An additional aspect of the instant disclosure provides a double stranded RNAi agent for inhibiting expression of a SOD1 gene, wherein the double stranded RNAi agent targeted to SOD1 includes a sense strand and an antisense strand forming a double stranded region, wherein the sense strand includes at least 15 e.g., 15, 16, 17, 18, 19, 20, or 21, contiguous nucleotides differing by no more than 3 nucleotides (i.e., differing by 3, 2, 1, or 0 nucleotides) from any one of the nucleotide sequences of SEQ ID NOs: 1, 3, 5, 7, and 9, or a nucleotide sequence having at least 90% nucleotide sequence identity, e.g. 90, 91, 92, 93, 94, 95, 96, 97, 98, 99, or 100% identity, to the entire nucleotide sequence of any one of SEQ ID NOs: 1, 3, 5, 7, or 9, and the antisense strand includes at least 15 e.g., 15, 16, 17, 18, 19, 20, 21, 22, or 23, contiguous nucleotides differing by no more than 3 nucleotides (i.e., differing by 3, 2, 1, or 0 nucleotides) from any one of the nucleotide sequences of SEQ ID NOs: 2, 4, 6, 8, and 10, or a nucleotide sequence having at least 90% nucleotide sequence identity, e.g. 90, 91, 92, 93, 94, 95, 96, 97, 98, 99, or 100% identity, to the entire nucleotide sequence of any one of SEQ ID NOs: 2, 4, 6, 8, and 10; wherein a substitution of a uracil for any thymine in the sequences provided in the SEQ ID NOs: 1-6 (when comparing aligned sequences) does not count as a difference that contributes to the differing by no more than 3 nucleotides from any one of the nucleotide sequences provided in SEQ ID NOs: 1-6, wherein substantially all of the nucleotides of the sense strand include a modification that is a 2′-O-methyl modification, a GNA, or a 2′-fluoro modification, wherein the sense strand includes two phosphorothioate internucleotide linkages at the 5′-terminus, wherein substantially all of the nucleotides of the antisense strand include a modification selected from the group consisting of a 2′-O-methyl modification and a 2′-fluoro modification, wherein the antisense strand includes two phosphorothioate internucleotide linkages at the 5′-terminus and two phosphorothioate internucleotide linkages at the 3′-terminus, and wherein the sense strand is conjugated to one or more lipophilic, e.g., C16, ligands, optionally, further comprising a liver targeting ligand, e.g., a ligand comprising one or more GalNAc derivatives.

[0278] Another aspect of the instant disclosure provides a double stranded RNAi agent for inhibiting expression of a SOD1 gene, wherein the double stranded RNAi agent targeted to SOD1 includes a sense strand and an antisense strand forming a double stranded region, wherein the sense strand includes at least 15 e.g., 15, 16, 17, 18, 19, 20, or 21, contiguous nucleotides differing by no more than 3 nucleotides (i.e., differing by 3, 2, 1, or 0 nucleotides) from any one of the nucleotide sequences of SEQ ID NOs: 1, 3, 5, 7, and 9, or a nucleotide sequence having at least 90% nucleotide sequence identity, e.g. 90, 91, 92, 93, 94, 95, 96, 97, 98, 99, or 100% identity, to the entire nucleotide sequence of any one of SEQ ID NOs: 1, 3, 5, 7, or 9, and the antisense strand includes at least 15 e.g., 15, 16, 17, 18, 19, 20, 21, 22, or 23, contiguous nucleotides differing by no more than 3 nucleotides (i.e., differing by 3, 2, 1, or 0 nucleotides) from any one of the nucleotide sequences of SEQ ID NOs: 2, 4, 6, 8, and 10, or a nucleotide sequence having at least 90% nucleotide sequence identity, e.g. 90, 91, 92, 93, 94, 95, 96, 97, 98, 99, or 100% identity, to the entire nucleotide sequence of any one of SEQ ID NOs: 2, 4, 6, 8, and 10, wherein a substitution of a uracil for any thymine in the sequences provided in the SEQ ID NOs: 1-10 (when comparing aligned sequences) does not count as a difference that contributes to the differing by no more than 3 nucleotides from any one of the nucleotide sequences provided in SEQ ID NOs:1-10; wherein the sense strand includes at least one 3′-terminal deoxythimidine nucleotide (dT), and wherein the antisense strand includes at least one 3′-terminal deoxythimidine nucleotide (dT).

[0279] In one embodiment, all of the nucleotides of the sense strand and all of the nucleotides of the antisense strand are modified nucleotides.

[0280] In another embodiment, each strand has 19-30 nucleotides.

[0281] In certain embodiments, the antisense strand of the RNAi agent includes at least one thermally destabilizing modification of the duplex within the first 9 nucleotide positions of the 5′ region or a precursor thereof. Optionally, the thermally destabilizing modification of the duplex is one or more of

[chemical structure]

wherein B is nucleobase.

[0282] Another aspect of the instant disclosure provides a cell containing a double stranded RNAi agent of the instant disclosure.

[0283] An additional aspect of the instant disclosure provides a pharmaceutical composition for inhibiting expression of a SOD1 gene that includes a double stranded RNAi agent of the instant disclosure.

[0284] In one embodiment, the double stranded RNAi agent is administered in an unbuffered solution. Optionally, the unbuffered solution is saline or water.

[0285] In another embodiment, the double stranded RNAi agent is administered with a buffer solution. Optionally, the buffer solution includes acetate, citrate, prolamine, carbonate, or phosphate or any combination thereof. In another embodiment, the buffer solution is phosphate buffered saline (PBS).

[0286] Another aspect of the disclosure provides a pharmaceutical composition that includes a double stranded RNAi agent of the instant disclosure and a lipid formulation.

[0287] In one embodiment, the lipid formulation includes a lipid nanoparticle (LNP).

[0288] An additional aspect of the disclosure provides a method of inhibiting expression of a SOD1 gene in a cell, the method involving: (a) contacting the cell with a double stranded RNAi agent of the instant disclosure or a pharmaceutical composition of of the instant disclosure; and (b) maintaining the cell produced in step (a) for a time sufficient to obtain degradation of the mRNA transcript of a SOD1 gene, thereby inhibiting expression of the SOD1 gene in the cell.

[0289] In one embodiment, the cell is within a subject. Optionally, the subject is a human.

[0290] In certain embodiments, the subject is a rhesus monkey, a cynomolgous monkey (also known as a crab-eating macaque), a mouse, dog, or a rat.

[0291] In certain embodiments, the human subject suffers from a SOD1-associated neurodegenerative disease, e.g., Amyotrophic Lateral Sclerosis (ALS), Alzheimer's disease (AD), Parkinson's disease (PD), and Down's syndrome (DS).

[0292] In certain embodiments, the method further involves administering an additional therapeutic agent or therapy to the subject. Exemplary additional therapeutics and treatments include, for example, sedatives, antidepressants, clonazepam, sodium valproate, opiates, antiepileptic drugs, cholinesterase inhibitors, memantine, benzodiazepines, levodopa, COMT inhibitors (e.g., tolcapone and entacapone), dopamine agonists (e.g., bromocriptine, pergolide, pramipexole, ropinirole, piribedil, cabergoline, apomorphine and lisuride), MAO-B inhibitors (e.g., safinamide, selegiline and rasagiline), amantadine, an anticholinergic, modafinil, pimavanserin, doxepin, rasagline, an antipsychotic, an atypical antipsychotic (e.g., amisulpride, olanzapine, risperidone, and clozapine), riluzole, edaravone, deep brain stimulation, non-invasive ventilation (NIV), invasive ventilation physical therapy, occupational therapy, speech therapy, dietary changes and swallowing technique a feeding tube, a PEG tube, probiotics, and psychological therapy.

[0293] In certain embodiments, the double stranded RNAi agent is administered at a dose of about 0.01 mg/kg to about 50 mg/kg.

[0294] In some embodiments, the double stranded RNAi agent is administered to the subject intrathecally.

[0295] In one embodiment, the method reduces the expression of a SOD1 gene in a brain (e.g., striatum) or spine tissue. Optionally, the brain or spine tissue is striatum, frontal cortex, temporal cortex, cerebellum, hippocampus, cervical spine, lumbar spine, or thoracic spine.

[0296] In one embodiment, the method reduces the expression of a SOD1 gene in an eye (with or without lens), heart, kidney, liver, lung and/or muscle tissue or cell.

[0297] In some embodiments, the double stranded RNAi agent is administered to the subject subcutaneously.

[0298] In some embodiments, the double stranded RNAi agent is administered to the subject intracerebroventricularly.

[0299] In some embodiments, the double stranded RNAi agent is administered to the subject intrathecally.

[0300] In one embodiment, the method reduces the expression of a SOD1 gene in the liver.

[0301] In other embodiments, the method reduces the expression of a SOD1 gene in the liver and the brain.

[0302] Another aspect of the instant disclosure provides a method of inhibiting the expression of SOD1 in a subject, the method involving: administering to the subject a therapeutically effective amount of a double stranded RNAi agent of the disclosure or a pharmaceutical composition of the disclosure, thereby inhibiting the expression of SOD1 in the subject.

[0303] An additional aspect of the disclosure provides a method for treating or preventing a disorder or SOD1-associated neurodegenerative disease or disorder in a subject, the method involving administering to the subject a therapeutically effective amount of a double stranded RNAi agent of the disclosure or a pharmaceutical composition of the disclosure, thereby treating or preventing a SOD1-associated neurodegenerative disease or disorder in the subject.

[0304] In certain embodiments, the SOD1-associated neurodegenerative disease or disorder is selected from the group consisting of Amyotrophic Lateral Sclerosis (ALS), Alzheimer's disease (AD), Parkinson's disease (PD), and Down's syndrome (DS).

[0305] Another aspect of the instant disclosure provides a kit for performing a method of the instant disclosure, the kit including: a) a double stranded RNAi agent of the instant disclosure, and b) instructions for use, and c) optionally, a device for administering the double stranded RNAi agent to the subject.

[0306] An additional aspect of the instant disclosure provides a double stranded ribonucleic acid (RNAi) agent for inhibiting expression of a SOD1 gene, wherein the RNAi agent possesses a sense strand and an antisense strand, and wherein the antisense strand includes a region of complementarity which includes at least 15 e.g., 15, 16, 17, 18, 19, 20, 21, 22, or 23, contiguous nucleotides differing by no more than 3 nucleotides (i.e., differing by 3, 2, 1, or 0 nucleotides), e.g., at least 15 e.g., 15, 16, 17, 18, 19, 20, 21, 22, or 23, nucleotides (i.e., differing by 3, 2, 1, or 0 nucleotides), at least 19, e.g., 19, 20, 21, 22, or 23, nucleotides (i.e., differing by 3, 2, 1, or 0 nucleotides), from any one of the antisense strand nucleobase sequences of Tables 2-7, 12, 13, and 18-20. In one embodiment, the RNAi agent includes one or more of the following modifications: a 2′-O-methyl modified nucleotide, a 2′-fluoro modified nucleotide, a 2′-C-alkyl-modified nucleotide, a nucleotide comprising a glycol nucleic acid (GNA), a phosphorothioate (PS) and a vinyl phosphonate (VP). Optionally, the RNAi agent includes at least one of each of the following modifications: a 2′-O-methyl modified nucleotide, a 2′-fluoro modified nucleotide, a 2′-C-alkyl-modified nucleotide, a nucleotide comprising a glycol nucleic acid (GNA), a phosphorothioate and a vinyl phosphonate (VP).

[0307] In another embodiment, the RNAi agent includes four or more PS modifications, optionally six to ten PS modifications, optionally eight PS modifications.

[0308] In an additional embodiment, each of the sense strand and the antisense strand of the RNAi agent possesses a 5′-terminus and a 3′-terminus, and the RNAi agent includes eight PS modifications positioned at each of the penultimate and ultimate internucleotide linkages from the respective 3′- and 5′-termini of each of the sense and antisense strands of the RNAi agent.

[0309] In another embodiment, each of the sense strand and the antisense strand of the RNAi agent includes a 5′-terminus and a 3′-terminus, and the RNAi agent includes only one nucleotide including a GNA. Optionally, the nucleotide including a GNA is positioned on the antisense strand at the seventh nucleobase residue from the 5′-terminus of the antisense strand.

[0310] In an additional embodiment, each of the sense strand and the antisense strand of the RNAi agent includes a 5′-terminus and a 3′-terminus, and the RNAi agent includes one to four 2′-C-alkyl-modified nucleotides. Optionally, the 2′-C-alkyl-modified nucleotide is a 2′-C16-modified nucleotide. Optionally, the RNAi agent includes a single 2′-C-alkyl, e.g., C16-modified nucleotide. Optionally, the single 2′-C-alkyl, e.g., C16-modified nucleotide is located on the sense strand at the sixth nucleobase position from the 5′-terminus of the sense strand.

[0311] In another embodiment, each of the sense strand and the antisense strand of the RNAi agent includes a 5′-terminus and a 3′-terminus, and the RNAi agent includes two or more 2′-fluoro modified nucleotides. Optionally, each of the sense strand and the antisense strand of the RNAi agent includes two or more 2′-fluoro modified nucleotides. Optionally, the 2′-fluoro modified nucleotides are located on the sense strand at nucleobase positions 7, 9, 10, and 11 from the 5′-terminus of the sense strand and on the antisense strand at nucleobase positions 2, 14, and 16 from the 5′-terminus of the antisense strand.

[0312] In an additional embodiment, each of the sense strand and the antisense strand of the RNAi agent includes a 5′-terminus and a 3′-terminus, and the RNAi agent includes one or more VP modifications. Optionally, the RNAi agent includes a single VP modification at the 5′-terminus of the antisense strand.

[0313] In another embodiment, each of the sense strand and the antisense strand of the RNAi agent includes a 5′-terminus and a 3′-terminus, and the RNAi agent includes two or more 2′-O-methyl modified nucleotides. Optionally, the RNAi agent includes 2′-O-methyl modified nucleotides at all nucleobase locations not modified by a 2′-fluoro, a 2′-C-alkyl or a glycol nucleic acid (GNA). Optionally, the two or more 2′-O-methyl modified nucleotides are located on the sense strand at positions 1, 2, 3, 4, 5, 8, 12, 13, 14, 15, 16, 17, 18, 19, 20, and 21 from the 5′-terminus of the sense strand and on the antisense strand at positions 1, 3, 4, 5, 6, 8, 9, 10, 11, 12, 13, 15, 17, 18, 19, 20, 21, 22 and 23 from the 5′-terminus of the antisense strand.

[0314] In another embodiment, the RNAi agent is a pharmaceutically acceptable salt thereof. “Pharmaceutically acceptable salts” of each of RNAi agents herein include, but are not limited to, a sodium salt, a calcium salt, a lithium salt, a potassium salt, an ammonium salt, a magnesium salt, an mixtures thereof. One skilled in the art will appreciate that the RNAi agent, when provided as a polycationic salt having one cation per free acid group of the optionally modified phosophodiester backbone and/or any other acidic modifications (e.g., 5′-terminal phosphonate groups). For example, an oligonucleotide of “n” nucleotides in length contains n−1 optionally modified phosophodiesters, so that an oligonucleotide of 21 nt in length may be provided as a salt having up to 20 cations (e.g, 20 sodium cations). Similarly, an RNAi agents having a sense strand of 21 nt in length and an antisense strand of 23 nt in length may be provided as a salt having up to 42 cations (e.g, 42 sodium cations). In the preceding example, where the RNAi agent also includes a 5′-terminal phosphate or a 5′-terminal vinylphosphonate group, the RNAi agent may be provided as a salt having up to 44 cations (e.g, 44 sodium cations).

[0315] In another embodiment, an antisense oligonucleotide is provided having a nucleotide sequence that is any one of the antisense nucleotide sequences listed in any one of Tables 3, 5, 7, 13, 18, and 20 but lacking the 3′-terminal nucleotide (3′N-1 AS), or a pharmaceutically acceptable salt thereof (see, for example, FIG. 5). In another embodiment, a dsRNA duplex is provided comprising an antisense strand having a nucleotide sequence that is any one of the antisense nucleotide sequences listed in any one of Tables 3, 5, 7, 13, 18, and 20 but lacking the 3′-terminal nucleotide (3′N-1 AS), and a sense strand that is substantially complementary to the antisense oligonucleotide, or a pharmaceutically acceptable salt thereof. In another embodiment, a dsRNA duplex is provided comprising any one of the duplexes in any one of Tables 3, 5, 7, 13, 18, or 20, where the antisense nucleotide sequence is replaced with an antisense oligonucleotide sequence lacking the 3′-terminal nucleotide (3′N-1 AS), or a pharmaceutically acceptable salt thereof.

[0316] In one embodiment, an antisense oligonucleotide is provided having the nucleotide sequence of any one of SEQ ID NO. 1369-1378 (see Table 23), or a pharmaceutically acceptable salt thereof. In one embodiment, an antisense oligonucleotide is provided having the nucleotide sequence of SEQ ID NO. 1369, or a pharmaceutically acceptable salt thereof. In one embodiment, an antisense oligonucleotide is provided having the nucleotide sequence of SEQ ID NO. 1370, or a pharmaceutically acceptable salt thereof. In one embodiment, an antisense oligonucleotide is provided having the nucleotide sequence of SEQ ID NO. 1371, or a pharmaceutically acceptable salt thereof.

[0317] In another embodiment, a dsRNA duplex is provided comprising an antisense strand having a nucleotide sequence of SEQ ID NO. 1369, and a sense strand that is substantially complementary to the antisense oligonucleotide, or a pharmaceutically acceptable salt thereof. In another embodiment, a dsRNA duplex is provided comprising an antisense strand having a nucleotide sequence of SEQ ID NO. 1370, and a sense strand that is substantially complementary to the antisense oligonucleotide, or a pharmaceutically acceptable salt thereof. In another embodiment, a dsRNA duplex is provided comprising an antisense strand having a nucleotide sequence of SEQ ID NO. 1371, and a sense strand that is substantially complementary to the antisense oligonucleotide, or a pharmaceutically acceptable salt thereof.

[0318] In another embodiment, a dsRNA duplex is provided comprising an antisense strand having a nucleotide sequence of SEQ ID NO. 1369, and a sense strand having a sequence of SEQ ID NO. 11, or a pharmaceutically acceptable salt thereof. In another embodiment, a dsRNA duplex is provided comprising an antisense strand having a nucleotide sequence of SEQ ID NO. 1370, and a sense strand having a nucleotide sequence of SEQ ID NO. 1371, or a pharmaceutically acceptable salt thereof. In another embodiment, a dsRNA duplex is provided comprising an antisense strand having a nucleotide sequence of SEQ ID NO. 1371, and a sense strand having a nucleotide sequence of SEQ ID NO. 15, or a pharmaceutically acceptable salt thereof.

[0319] The present invention is further illustrated by the following detailed description and drawings.

### BRIEF DESCRIPTION OF THE DRAWINGS

[0320] FIG. 1 is a graph depicting human SOD1 mRNA levels in mice subcutaneously administered a single 3 mg/kg dose of the indicated dsRNA duplexes. Human SOD1 mRNA levels are shown relative to control levels detected with PBS treatment.

[0321] FIG. 2 is a graph depicting human SOD1 mRNA levels in the indicated areas of the brain and spinal cord of mice following intracerebroventricular injection (ICV) of a single 25 μg, 50 μg, 100 μg, 150 μg, 200 μg, or 300 μg dose of AD-401824, or artificial CSF (aCSF).

[0322] FIG. 3A is a graph depicting the effect of a single 50 nM, 10 nM, 1 nM, or 0.1 nM dose of the indicated duplexes on hSOD1 mRNA expression in BE(2)c cells on Day 14 post-dose.

[0323] FIG. 3B is a graph depicting the effect of a single 0.9 mg intrathecally administered dose of the indicated duplexes on hSOD1 mRNA expression in the lumbar, thoracic, and cervical spinal cord regions of G93A rats on Day 14 post-dose.

[0324] FIG. 4A are graphs depicting the concentration of the indicated duplexes in the cervical, thoracic or lumbar spinal cords of rats administered a single dose of the indicated duplexes.

[0325] FIG. 4B are graphs depicting the concentration of the indicated duplexes in the cerebral cortices or brainstems of rats administered a single dose of the indicated duplexes.

[0326] FIG. 4C is a Table depicting the retention times of the indicated duplexes in the cervical spinal cords, thoracic spinal cords, lumbar spinal cords, cerebral cortices or brainstems of rats administered a single dose of the indicated duplexes.

[0327] FIG. 5 is a Table depicting the metabolite profiles in the cerebral cortices and lumbar spinal cords of rats administered a single dose of the indicated duplexes. FIG. 5 discloses SEQ ID NOS 1366, 1366, 1366, 1366-1367, 1367, 1367-1368 and 1368, respectively, in order of appearance.

[0328] FIG. 6 is a Table summarizing the tissue exposure and metabolite profiling of duplexes AD-1395762, AD-1395756, and AD-1395731.

[0329] FIG. 7 is a Table depicting the study protocol assessing the effect of the indicated duplexes on SOD1 mRNA and protein expression in non-human primates.

[0330] FIG. 8A is a Table depicting the numbers of non-human primates considered to have received “bad exposure” (duplex levels in a CSF sample <1,000 ng/mL at 24 hours), “good exposure” (duplex levels in a CSF sample >3,000 ng/mL at 24 hours), or “partial exposure” (duplex levels in a CSF sample 1,000-3,000 ng/mL at 24 hours) to a single 70 mg intrathecally administered dose of AD-1395762, AD-1395756, or AD-1395731.

[0331] FIG. 8B are graphs depicting the level of SOD1 mRNA in lumbar spinal cord (L3), thoracic spinal cord (T1-T5), cervical spinal cord (C7), frontal cortex (FC), brainstem (BS), or pons samples in non-human primates following intrathecal administration of a single 70 mg dose of the indicated duplexes at Days 31 and 85 post-dose.

[0332] FIG. 8C are graphs depicting the level of SOD1 mRNA in lumbar spinal cord (L3), thoracic spinal cord (T1-T5), cervical spinal cord (C7), frontal cortex (FC), brainstem (BS), or pons samples in non-human primates following intrathecal administration of a single 70 mg dose of the indicated duplexes at Day 85 post-dose. FIG. 8C discloses SEQ ID NOS 1281, 1284, 71 and 1366-1368, respectively, in order of appearance.

[0333] FIG. 9A are graphs depicting the level of SOD1 protein levels in CSF samples from individual non-human primates following intrathecal administration of a single 70 mg dose of the indicated duplexes at Days 0, 8, 14, 29, 57, and 85 post-dose.

[0334] FIG. 9A are graphs depicting the level of SOD1 protein levels in CSF samples from individual non-human primates following intrathecal administration of a single 70 mg dose of the indicated duplexes at Days 0, 8, 14, 29, 57, and 85 post-dose.

[0335] FIG. 9B are graphs depicting the level of SOD1 protein levels in CSF samples from individual non-human primates following intrathecal administration of a single 70 mg dose of the indicated duplexes out to Day 85 post-dose (top) and the level of SOD1 protein level in CSF samples from three individual non-human primates following intrathecal administration of a single 70 mg dose of the indicated duplexes in CSF samples from individual non-human primates following intrathecal administration of a single 70 mg dose of the indicated duplexes out to Day 85 post-dose extended out to Day 141 post-dose.

[0336] FIG. 9C is a graph depicting the level of SOD1 protein levels in prefrontal, thoracic spinal cord (T9-12) and CSF samples in non-human primates following intrathecal administration of a single 70 mg dose of the indicated duplexes at Day 85 post-dose.

[0337] FIG. 10 are graphs depicting that the observed reductions in mRNA levels and protein levels in prefrontal cortex samples and thoracic spinal cord (T9-12) samples are highly and significantly correlated in NHP following intrathecal administration of a single 70 mg dose of the indicated duplexes.

[0338] FIG. 11A are graphs depicting the mRNA remaining versus siRNA exposure in prefrontal, brainstem, pons, cervical spinal cord (SC_C5-C6), cervical spinal cord (SC_C7), thoracic spinal cord (SC_T1-T5), thoracic spinal cord (SC_T9-T12), and lumbar spinal cord (SC_L3) tissues following intrathecal administration of a single 70 mg dose of the indicated duplexes.

[0339] FIG. 11B are graphs depicting that there is a strong correlation between both mRNA and protein reduction to the amount of siRNA exposure in both prefrontal cortex and thoracic spinal cord (SC_T0-T12) samples following a single intrathecally administered 70 mg dose of the indicated duplexes.

[0340] FIGS. 12A-12H are stacked bar graphs illustrating the in vitro SOD1 knockdown for each of the duplexes of Tables 14 and 15 in PCH or Be(2)C cells as mapped against NM_000454.4 for duplexes having target sequences starting at positions 199-225 (FIG. 12A, PCH; FIG. 12B, Be(2)C); positions 319-337 (FIG. 12C, PCH; FIG. 12D, Be(2)C); positions 364-382 (FIG. 12E, PCH; FIG. 12F, Be(2)C); and positions 516-540 (FIG. 12G, PCH; FIG. 12H, Be(2)C).

[0341] FIG. 13 is a graph showing a substantial absence of pharmacodynamic effect of the indicated dsRNA agents administered in the kidney and liver of NHP at Days 31 and 85 post-intrathecal administration.

### DETAILED DESCRIPTION OF THE INVENTION

[0342] The present disclosure provides RNAi compositions, which effect the RNA-induced silencing complex (RISC)-mediated cleavage of RNA transcripts of a SOD1 gene. The SOD1 gene may be within a cell, e.g., a cell within a subject, such as a human. The present disclosure also provides methods of using the RNAi compositions of the disclosure for inhibiting the expression of a SOD1 gene or for treating a subject having a disorder that would benefit from inhibiting or reducing the expression of a SOD1 gene, e.g., a SOD1-associated neurodegenerative disease, e.g., Amyotrophic Lateral Sclerosis (ALS), Alzheimer's disease (AD), Parkinson's disease (PD), and Down's syndrome (DS).

[0343] The RNAi agents of the disclosure include an RNA strand (the antisense strand) having a region which is about 30 nucleotides or less in length, e.g., 15-30, 15-29, 15-28, 15-27, 15-26, 15-25, 15-24, 15-23, 15-22, 15-21, 15-20, 15-19, 15-18, 15-17, 18-30, 18-29, 18-28, 18-27, 18-26, 18-25, 18-24, 18-23, 18-22, 18-21, 18-20, 19-30, 19-29, 19-28, 19-27, 19-26, 19-25, 19-24, 19-23, 19-22, 19-21, 19-20, 20-30, 20-29, 20-28, 20-27, 20-26, 20-25, 20-24,20-23, 20-22, 20-21, 21-30, 21-29, 21-28, 21-27, 21-26, 21-25, 21-24, 21-23, or 21-22 nucleotides in length, which region is substantially complementary to at least part of an mRNA transcript of a SOD1 gene. In certain embodiments, the RNAi agents of the disclosure include an RNA strand (the antisense strand) having a region which is about 21-23 nucleotides in length, which region is substantially complementary to at least part of an mRNA transcript of a SOD1 gene.

[0344] In certain embodiments, the RNAi agents of the disclosure include an RNA strand (the antisense strand) which can include longer lengths, for example up to 66 nucleotides, e.g., 36-66, 26-36, 25-36, 31-60, 22-43, 27-53 nucleotides in length with a region of at least 19 contiguous nucleotides that is substantially complementary to at least a part of an mRNA transcript of a SOD1 gene. These RNAi agents with the longer length antisense strands preferably include a second RNA strand (the sense strand) of 20-60 nucleotides in length wherein the sense and antisense strands form a duplex of 18-30 contiguous nucleotides.

[0345] The use of these RNAi agents enables the targeted degradation of mRNAs of a SOD1 gene in mammals. Thus, methods and compositions including these RNAi agents are useful for treating a subject who would benefit by a reduction in the levels or activity of a SOD1 protein, such as a subject having a SOD1-associated neurodegenerative disease, e.g., Amyotrophic Lateral Sclerosis (ALS), Alzheimer's disease (AD), Parkinson's disease (PD), and Down's syndrome (DS).

[0346] The following detailed description discloses how to make and use compositions containing RNAi agents to inhibit the expression of a SOD1 gene, as well as compositions and methods for treating subjects having diseases and disorders that would benefit from inhibition or reduction of the expression of the genes.

### I. Definitions

[0347] In order that the present disclosure may be more readily understood, certain terms are first defined. In addition, it should be noted that whenever a value or range of values of a parameter are recited, it is intended that values and ranges intermediate to the recited values are also intended to be part of this disclosure.

[0348] The articles “a” and “an” are used herein to refer to one or to more than one (i.e., to at least one) of the grammatical object of the article. By way of example, “an element” means one element or more than one element, e.g., a plurality of elements.

[0349] The term “including” is used herein to mean, and is used interchangeably with, the phrase “including but not limited to”.

[0350] The term “or” is used herein to mean, and is used interchangeably with, the term “and/or,” unless context clearly indicates otherwise.

[0351] The term “about” is used herein to mean within the typical ranges of tolerances in the art. For example, “about” can be understood as about 2 standard deviations from the mean. In certain embodiments, about means ±10%. In certain embodiments, about means ±5%. When about is present before a series of numbers or a range, it is understood that “about” can modify each of the numbers in the series or range.

[0352] The term “at least”, “no less than”, or “or more” prior to a number or series of numbers is understood to include the number adjacent to the term “at least”, and all subsequent numbers or integers that could logically be included, as clear from context. For example, the number of nucleotides in a nucleic acid molecule must be an integer. For example, “at least 18 nucleotides of a 21 nucleotide nucleic acid molecule” means that 18, 19, 20, or 21 nucleotides have the indicated property. When at least is present before a series of numbers or a range, it is understood that “at least” can modify each of the numbers in the series or range.

[0353] As used herein, “no more than” or “or less” is understood as the value adjacent to the phrase and logical lower values or integers, as logical from context, to zero. For example, a duplex with an overhang of “no more than 2 nucleotides” has a 2, 1, or 0 nucleotide overhang. When “no more than” is present before a series of numbers or a range, it is understood that “no more than” can modify each of the numbers in the series or range. As used herein, ranges include both the upper and lower limit.

[0354] As used herein, methods of detection can include determination that the amount of analyte present is below the level of detection of the method.

[0355] In the event of a conflict between an indicated target site and the nucleotide sequence for a sense or antisense strand, the indicated sequence takes precedence.

[0356] In the event of a conflict between a chemical structure and a chemical name, the chemical structure takes precedence.

[0357] As used herein, the term “Superoxide dismutase 1,” used interchangeably with the term “SOD1,” refers to the well-known gene and polypeptide, also known in the art as Superoxide Dismutase [Cu—Zn], Cu/Zn Superoxide Dismutase, Epididymis Secretory Protein Li 44, EC 1.15.1.1, and Indophenoloxidase A. The term “SOD1” includes human SOD1, the amino acid and nucleotide sequence of which may be found in, for example, GenBank Accession No. NM_000454.4 (GI: 48762945; SEQ ID NO:1); mouse SOD1, the amino acid and nucleotide sequence of which may be found in, for example, GenBank Accession No. NM_011434.1 (GI: 45597446; SEQ ID NO:3); Macaca fascicularis (crab-eating macaque, also known as cynomolgus monkey) SOD1, the amino acid and nucleotide sequence of which may be found in, for example, GenBank Accession No. NM_001285406.1 (GI: 549432988; SEQ ID NO:5); dog SOD1, the amino acid and nucleotide sequence of which may be found in, for example, GenBank Accession No. NM_001003035.1 (GI: 50978673; SEQ ID NO:7); and rat SOD1, the amino acid and nucleotide sequence of which may be found in, for example, GenBank Accession No. NM_017050.1 (GI: 8394327; SEQ ID NO:9).

[0358] Additional examples of SOD1 mRNA sequences are readily available using, e.g., GenBank, UniProt, OMIM, and the Macaca genome project web site.

[0359] Exemplary SOD1 nucleotide sequences may also be found in SEQ ID NOs:1-10. SEQ ID NOs: 2, 4, 6, 8, and 10 are the reverse complement sequences of SEQ ID NOs: 1, 3, 5, 7, and 9, respectively.

[0360] Further information on SOD1 is provided, for example in the NCBI Gene database at www.ncbi.nlm.nih.gov/gene/6647.

[0361] The entire contents of each of the foregoing GenBank Accession numbers and the Gene database numbers are incorporated herein by reference as of the date of filing this application.

[0362] The terms “Superoxide dismutase 1” and “SOD1,” as used herein, also refers to naturally occurring DNA sequence variations of the SOD1 gene. Numerous sequence variations within the SOD1 gene have been identified and may be found at, for example, NCBI dbSNP and UniProt (see, e.g., www.ncbi.nlm.nih.gov/snp?LinkName=gene_snp&from_uid=6647, the entire contents of which is incorporated herein by reference as of the date of filing this application.

[0363] As used herein, “target sequence” refers to a contiguous portion of the nucleotide sequence of an mRNA molecule formed during the transcription of a SOD1 gene, including mRNA that is a product of RNA processing of a primary transcription product. In one embodiment, the target portion of the sequence will be at least long enough to serve as a substrate for RNAi-directed cleavage at or near that portion of the nucleotide sequence of an mRNA molecule formed during the transcription of a SOD1 gene. In one embodiment, the target sequence is within the protein coding region of the SOD1 gene. In another embodiment, the target sequence is within the 3′ UTR of the SOD1 gene.

[0364] The target sequence may be from about 9-36 nucleotides in length, e.g., about 15-30 nucleotides in length. For example, the target sequence can be from about 15-30 nucleotides, 15-29, 15-28, 15-27, 15-26, 15-25, 15-24, 15-23, 15-22, 15-21, 15-20, 15-19, 15-18, 15-17, 18-30, 18-29, 18-28, 18-27, 18-26, 18-25, 18-24, 18-23, 18-22, 18-21, 18-20, 19-30, 19-29, 19-28, 19-27, 19-26, 19-25, 19-24, 19-23, 19-22, 19-21, 19-20, 20-30, 20-29, 20-28, 20-27, 20-26, 20-25, 20-24,20-23, 20-22, 20-21, 21-30, 21-29, 21-28, 21-27, 21-26, 21-25, 21-24, 21-23, or 21-22 nucleotides in length. In some embodiments, the target sequence is about 19 to about 30 nucleotides in length. In other embodiments, the target sequence is about 19 to about 25 nucleotides in length. In still other embodiments, the target sequence is about 19 to about 23 nucleotides in length. In some embodiments, the target sequence is about 21 to about 23 nucleotides in length. Ranges and lengths intermediate to the above recited ranges and lengths are also contemplated to be part of the invention.

[0365] As used herein, the term “strand comprising a sequence” refers to an oligonucleotide comprising a chain of nucleotides that is described by the sequence referred to using the standard nucleotide nomenclature.

[0366] “G,” “C,” “A,” “T”, and “U” each generally stand for a nucleotide that contains guanine, cytosine, adenine, thymidine, and uracil as a base, respectively in the context of a modified or unmodified nucleotide. However, it will be understood that the term “ribonucleotide” or “nucleotide” can also refer to a modified nucleotide, as further detailed below, or a surrogate replacement moiety (see, e.g., Table 1). The skilled person is well aware that guanine, cytosine, adenine, thymidine, and uracil can be replaced by other moieties without substantially altering the base pairing properties of an oligonucleotide comprising a nucleotide bearing such replacement moiety. For example, without limitation, a nucleotide comprising inosine as its base can base pair with nucleotides containing adenine, cytosine, or uracil. Hence, nucleotides containing uracil, guanine, or adenine can be replaced in the nucleotide sequences of dsRNA featured in the disclosure by a nucleotide containing, for example, inosine. In another example, adenine and cytosine anywhere in the oligonucleotide can be replaced with guanine and uracil, respectively to form G-U Wobble base pairing with the target mRNA. Sequences containing such replacement moieties are suitable for the compositions and methods featured in the disclosure.

[0367] The terms “iRNA”, “RNAi agent,” “iRNA agent,” “RNA interference agent” as used interchangeably herein, refer to an agent that contains RNA as that term is defined herein, and which mediates the targeted cleavage of an RNA transcript via an RNA-induced silencing complex (RISC) pathway. RNA interference (RNAi) is a process that directs the sequence-specific degradation of mRNA. RNAi modulates, e.g., inhibits, the expression of SOD1 in a cell, e.g., a cell within a subject, such as a mammalian subject.

[0368] In one embodiment, an RNAi agent of the disclosure includes a single stranded RNAi that interacts with a target RNA sequence, e.g., a SOD1 target mRNA sequence, to direct the cleavage of the target RNA. Without wishing to be bound by theory it is believed that long double stranded RNA introduced into cells is broken down into double-stranded short interfering RNAs (siRNAs) comprising a sense strand and an antisense strand by a Type III endonuclease known as Dicer (Sharp et al. (2001) Genes Dev. 15:485). Dicer, a ribonuclease-III-like enzyme, processes these dsRNA into 19-23 base pair short interfering RNAs with characteristic two base 3′ overhangs (Bernstein, et al., (2001) Nature 409:363). These siRNAs are then incorporated into an RNA-induced silencing complex (RISC) where one or more helicases unwind the siRNA duplex, enabling the complementary antisense strand to guide target recognition (Nykanen, et al., (2001) Cell 107:309). Upon binding to the appropriate target mRNA, one or more endonucleases within the RISC cleave the target to induce silencing (Elbashir, et al., (2001) Genes Dev. 15:188). Thus, in one aspect the disclosure relates to a single stranded RNA (ssRNA) (the antisense strand of a siRNA duplex) generated within a cell and which promotes the formation of a RISC complex to effect silencing of the target gene, i.e., a SOD1 gene. Accordingly, the term “siRNA” is also used herein to refer to an RNAi as described above.

[0369] In another embodiment, the RNAi agent may be a single-stranded RNA that is introduced into a cell or organism to inhibit a target mRNA. Single-stranded RNAi agents bind to the RISC endonuclease, Argonaute 2, which then cleaves the target mRNA. The single-stranded siRNAs are generally 15-30 nucleotides and are chemically modified. The design and testing of single-stranded RNAs are described in U.S. Pat. No. 8,101,348 and in Lima et al., (2012) Cell 150:883-894, the entire contents of each of which are hereby incorporated herein by reference. Any of the antisense nucleotide sequences described herein may be used as a single-stranded siRNA as described herein or as chemically modified by the methods described in Lima et al., (2012) Cell 150:883-894.

[0370] In another embodiment, a “RNAi agent” for use in the compositions and methods of the disclosure is a double stranded RNA and is referred to herein as a “double stranded RNAi agent,” “double stranded RNA (dsRNA) molecule,” “dsRNA agent,” or “dsRNA”. The term “dsRNA” refers to a complex of ribonucleic acid molecules, having a duplex structure comprising two anti-parallel and substantially complementary nucleic acid strands, referred to as having “sense” and “antisense” orientations with respect to a target RNA, i.e., a SOD1 gene. In some embodiments of the disclosure, a double stranded RNA (dsRNA) triggers the degradation of a target RNA, e.g., an mRNA, through a post-transcriptional gene-silencing mechanism referred to herein as RNA interference or RNAi.

[0371] In general, a dsRNA molecule can include ribonucleotides, but as described in detail herein, each or both strands can also include one or more non-ribonucleotides, e.g., a deoxyribonucleotide, a modified nucleotide. In addition, as used in this specification, an “RNAi agent” may include ribonucleotides with chemical modifications; an RNAi agent may include substantial modifications at multiple nucleotides.

[0372] As used herein, the term “modified nucleotide” refers to a nucleotide having, independently, a modified sugar moiety, a modified internucleotide linkage, or a modified nucleobase. Thus, the term modified nucleotide encompasses substitutions, additions or removal of, e.g., a functional group or atom, to internucleoside linkages, sugar moieties, or nucleobases. The modifications suitable for use in the agents of the disclosure include all types of modifications disclosed herein or known in the art. Any such modifications, as used in a siRNA type molecule, are encompassed by “RNAi agent” for the purposes of this specification and claims.

[0373] In certain embodiments of the instant disclosure, inclusion of a deoxy-nucleotide—which is acknowledged as a naturally occurring form of nucleotide—if present within a RNAi agent can be considered to constitute a modified nucleotide.

[0374] The duplex region may be of any length that permits specific degradation of a desired target RNA through a RISC pathway, and may range from about 9 to 36 base pairs in length, e.g., about 15-30 base pairs in length, for example, about 9, 10, 11, 12, 13, 14, 15, 16, 17, 18, 19, 20, 21, 22, 23, 24, 25, 26, 27, 28, 29, 30, 31, 32, 33, 34, 35, or 36 base pairs in length, such as about 15-30, 15-29, 15-28, 15-27, 15-26, 15-25, 15-24, 15-23, 15-22, 15-21, 15-20, 15-19, 15-18, 15-17, 18-30, 18-29, 18-28, 18-27, 18-26, 18-25, 18-24, 18-23, 18-22, 18-21, 18-20, 19-30, 19-29, 19-28, 19-27, 19-26, 19-25, 19-24, 19-23, 19-22, 19-21, 19-20, 20-30, 20-29, 20-28, 20-27, 20-26, 20-25, 20-24,20-23, 20-22, 20-21, 21-30, 21-29, 21-28, 21-27, 21-26, 21-25, 21-24, 21-23, or 21-22 base pairs in length. Ranges and lengths intermediate to the above recited ranges and lengths are also contemplated to be part of the invention.

[0375] The two strands forming the duplex structure may be different portions of one larger RNA molecule, or they may be separate RNA molecules. Where the two strands are part of one larger molecule, and therefore are connected by an uninterrupted chain of nucleotides between the 3′-end of one strand and the 5′-end of the respective other strand forming the duplex structure, the connecting RNA chain is referred to as a “hairpin loop.” A hairpin loop can comprise at least one unpaired nucleotide. In some embodiments, the hairpin loop can comprise at at least 4, at least 5, at least 6, at least 7, at least 8, at least 9, at least 10, at least 20, at least 23 or more unpaired nucleotides or nucleotides not directed to the target site of the dsRNA. In some embodiments, the hairpin loop can be 10 or fewer nucleotides. In some embodiments, the hairpin loop can be 8 or fewer unpaired nucleotides. In some embodiments, the hairpin loop can be 4-10 unpaired nucleotides. In some embodiments, the hairpin loop can be 4-8 nucleotides.

[0376] In certain embodiment, the two strands of double-stranded oligomeric compound can be linked together. The two strands can be linked to each other at both ends, or at one end only. By linking at one end is meant that 5′-end of first strand is linked to the 3′-end of the second strand or 3′-end of first strand is linked to 5′-end of the second strand. When the two strands are linked to each other at both ends, 5′-end of first strand is linked to 3′-end of second strand and 3′-end of first strand is linked to 5′-end of second strand. The two strands can be linked together by an oligonucleotide linker including, but not limited to, (N)n; wherein N is independently a modified or unmodified nucleotide and n is 3-23. In some embodiments, n is 3-10, e.g., 3, 4, 5, 6, 7, 8, 9, or 10. In some embodiments, the oligonucleotide linker is selected from the group consisting of GNRA, (G)4, (U)4, and (dT)4, wherein N is a modified or unmodified nucleotide and R is a modified or unmodified purine nucleotide. Some of the nucleotides in the linker can be involved in base-pair interactions with other nucleotides in the linker. The two strands can also be linked together by a non-nucleosidic linker, e.g. a linker described herein. It will be appreciated by one of skill in the art that any oligonucleotide chemical modifications or variations describe herein can be used in the oligonucleotide linker.

[0377] Hairpin and dumbbell type oligomeric compounds will have a duplex region equal to or at least 14, 15, 15, 16, 17, 18, 19, 29, 21, 22, 23, 24, or 25 nucleotide pairs. The duplex region can be equal to or less than 200, 100, or 50, in length. In some embodiments, ranges for the duplex region are 15-30, 17 to 23, 19 to 23, and 19 to 21 nucleotides pairs in length.

[0378] The hairpin oligomeric compounds can have a single strand overhang or terminal unpaired region, in some embodiments at the 3′, and in some embodiments on the antisense side of the hairpin. In some embodiments, the overhangs are 1-4, more generally 2-3 nucleotides in length. The hairpin oligomeric compounds that can induce RNA interference are also referred to as “shRNA” herein.

[0379] Where the two substantially complementary strands of a dsRNA are comprised by separate RNA molecules, those molecules need not, but can be covalently connected. Where the two strands are connected covalently by means other than an uninterrupted chain of nucleotides between the 3′-end of one strand and the 5′-end of the respective other strand forming the duplex structure, the connecting structure is referred to as a “linker.” The RNA strands may have the same or a different number of nucleotides. The maximum number of base pairs is the number of nucleotides in the shortest strand of the dsRNA minus any overhangs that are present in the duplex. In addition to the duplex structure, an RNAi may comprise one or more nucleotide overhangs.

[0380] In one embodiment, an RNAi agent of the invention is a dsRNA, each strand of which is 24-30 nucleotides in length, that interacts with a target RNA sequence, e.g., a SOD1 target mRNA sequence, to direct the cleavage of the target RNA. Without wishing to be bound by theory, long double stranded RNA introduced into cells is broken down into siRNA by a Type III endonuclease known as Dicer (Sharp et al. (2001) Genes Dev. 15:485). Dicer, a ribonuclease-III-like enzyme, processes the dsRNA into 19-23 base pair short interfering RNAs with characteristic two base 3′ overhangs (Bernstein, et al., (2001) Nature 409:363). The siRNAs are then incorporated into an RNA-induced silencing complex (RISC) where one or more helicases unwind the siRNA duplex, enabling the complementary antisense strand to guide target recognition (Nykanen, et al., (2001) Cell 107:309). Upon binding to the appropriate target mRNA, one or more endonucleases within the RISC cleave the target to induce silencing (Elbashir, et al., (2001) Genes Dev. 15:188).

[0381] In one embodiment, an RNAi agent of the invention is a dsRNA agent, each strand of which comprises 19-23 nucleotides that interacts with a SOD1 RNA sequence to direct the cleavage of the target RNA. Without wishing to be bound by theory, long double stranded RNA introduced into cells is broken down into siRNA by a Type III endonuclease known as Dicer (Sharp et al. (2001) Genes Dev. 15:485). Dicer, a ribonuclease-III-like enzyme, processes the dsRNA into 19-23 base pair short interfering RNAs with characteristic two base 3′ overhangs (Bernstein, et al., (2001) Nature 409:363). The siRNAs are then incorporated into an RNA-induced silencing complex (RISC) where one or more helicases unwind the siRNA duplex, enabling the complementary antisense strand to guide target recognition (Nykanen, et al., (2001) Cell 107:309). Upon binding to the appropriate target mRNA, one or more endonucleases within the RISC cleave the target to induce silencing (Elbashir, et al., (2001) Genes Dev. 15:188). In one embodiment, an RNAi agent of the invention is a dsRNA of 24-30 nucleotides that interacts with a SOD1 RNA sequence to direct the cleavage of the target RNA.

[0382] As used herein, the term “nucleotide overhang” refers to at least one unpaired nucleotide that protrudes from the duplex structure of a RNAi agent, e.g., a dsRNA. For example, when a 3′-end of one strand of a dsRNA extends beyond the 5′-end of the other strand, or vice versa, there is a nucleotide overhang. A dsRNA can comprise an overhang of at least one nucleotide; alternatively, the overhang can comprise at least two nucleotides, at least three nucleotides, at least four nucleotides, at least five nucleotides or more. A nucleotide overhang can comprise or consist of a nucleotide/nucleoside analog, including a deoxynucleotide/nucleoside. The overhang(s) can be on the sense strand, the antisense strand or any combination thereof. Furthermore, the nucleotide(s) of an overhang can be present on the 5′-end, 3′-end or both ends of either an antisense or sense strand of a dsRNA.

[0383] In one embodiment, the antisense strand of a dsRNA has a 1-10 nucleotide, e.g., a 1, 2, 3, 4, 5, 6, 7, 8, 9, or 10 nucleotide, overhang at the 3′-end or the 5′-end. In one embodiment, the sense strand of a dsRNA has a 1-10 nucleotide, e.g., a 1, 2, 3, 4, 5, 6, 7, 8, 9, or 10 nucleotide, overhang at the 3′-end or the 5′-end. In another embodiment, one or more of the nucleotides in the overhang is replaced with a nucleoside thiophosphate.

[0384] In certain embodiments, the antisense strand of a dsRNA has a 1-10 nucleotide, e.g., 0-3, 1-3, 2-4, 2-5, 4-10, 5-10, e.g., a 1, 2, 3, 4, 5, 6, 7, 8, 9, or 10 nucleotide, overhang at the 3′-end or the 5′-end. In one embodiment, the sense strand of a dsRNA has a 1-10 nucleotide, e.g., a 1, 2, 3, 4, 5, 6, 7, 8, 9, or 10 nucleotide, overhang at the 3′-end or the 5′-end. In another embodiment, one or more of the nucleotides in the overhang is replaced with a nucleoside thiophosphate.

[0385] In certain embodiments, the overhang on the sense strand or the antisense strand, can include extended lengths longer than 10 nucleotides, e.g., 1-30 nucleotides, 2-30 nucleotides, 10-30 nucleotides, or 10-15 nucleotides in length. In certain embodiments, an extended overhang is on the sense strand of the duplex. In certain embodiments, an extended overhang is present on the 3′end of the sense strand of the duplex. In certain embodiments, an extended overhang is present on the 5′end of the sense strand of the duplex. In certain embodiments, an extended overhang is on the antisense strand of the duplex. In certain embodiments, an extended overhang is present on the 3′end of the antisense strand of the duplex. In certain embodiments, an extended overhang is present on the 5′end of the antisense strand of the duplex. In certain embodiments, one or more of the nucleotides in the overhang is replaced with a nucleoside thiophosphate. In certain embodiments, the overhang includes a self-complementary portion such that the overhang is capable of forming a hairpin structure that is stable under physiological conditions.

[0386] In certain embodiments, at least one end of at least one strand is extended beyond a duplex targeting region, including structures where one of the strands includes a thermodynamically-stabilizing tetraloop structure (see, e.g., U.S. Pat. Nos. 8,513,207 and 8,927,705, as well as W02010033225, the entire contents of each of which are incorporated by reference herein). Such structures may include single-stranded extensions (on one or both sides of the molecule) as well as double-stranded extensions.

[0387] In certain embodiments, the 3′ end of the sense strand and the 5′ end of the antisense strand are joined by a polynucleotide sequence comprising ribonucleotides, deoxyribonucleotides or both, optionally wherein the polynucleotide sequence comprises a tetraloop sequence. In certain embodiments, the sense strand is 25-35 nucleotides in length.

[0388] A tetraloop may contain ribonucleotides, deoxyribonucleotides, modified nucleotides, and combinations thereof. Typically, a tetraloop has 4 to 5 nucleotides. In some embodiments, the loop comprises a sequence set forth as GAAA. In some embodiments, at least one of the nucleotide of the loop (GAAA) comprises a nucleotide modification. In some embodiments, the modified nucleotide comprises a 2-modification. In some embodiments, the 2′-modification is a modification selected from the group consisting of 2′-aminoethyl, 2′-fluoro, 2′-O-methyl, 2′-O-methoxyethyl, 2′-aminodiethoxymethanol, 2′-adem, and 2′-deoxy-2′-fhioro-d-arabinonucleic acid. In some embodiments, all of the nucleotides of the loop are modified. In some embodiments, the G in the GAAA sequence comprises a 2′-OH. In some embodiments, each of the nucleotides in the GAAA sequence comprises a 2′-O-methyl modification. In some embodiments, each of the A in the GAAA sequence comprises a 2′-OH and the G in the GAAA sequence comprises a 2′-O-methyl modification. In preferred embodiments, In some embodiments, each of the A in the GAAA sequence comprises a 2′-O-methoxyethyl (MOE) modification and the G in the GAAA sequence comprises a 2′-O-methyl modification; or each of the A in the GAAA sequence comprises a 2′-adem modification and the G in the GAAA sequence comprises a 2′-O-methyl modification. See, e.g., PCT Publication No. WO 2020/206350, the entire contents of which are incorporated herein by reference.

[0389] An exemplary 2′adem modified nucleotide is shown below:

[chemical structure]

[0390] In one embodiment of the dsRNA, at least one strand comprises a 3′ overhang of at least 1 nucleotide. In another embodiment, at least one strand comprises a 3′ overhang of at least 2 nucleotides, e.g., 2, 3, 4, 5, 6, 7, 9, 10, 11, 12, 13, 14, or 15 nucleotides. In other embodiments, at least one strand of the RNAi agent comprises a 5′ overhang of at least 1 nucleotide. In certain embodiments, at least one strand comprises a 5′ overhang of at least 2 nucleotides, e.g., 2, 3, 4, 5, 6, 7, 9, 10, 11, 12, 13, 14, or 15 nucleotides. In still other embodiments, both the 3′ and the 5′ end of one strand of the RNAi agent comprise an overhang of at least 1 nucleotide.

[0391] In one embodiment, the antisense strand of a dsRNA has a 1-10 nucleotide, e.g., 0-3, 1-3, 2-4, 2-5, 4-10, 5-10, e.g., a 1, 2, 3, 4, 5, 6, 7, 8, 9, or 10 nucleotide, overhang at the 3′-end or the 5′-end. In one embodiment, the sense strand of a dsRNA has a 1-10 nucleotide, e.g., a 1, 2, 3, 4, 5, 6, 7, 8, 9, or 10 nucleotide, overhang at the 3′-end or the 5′-end. In another embodiment, one or more of the nucleotides in the overhang is replaced with a nucleoside thiophosphate.

[0392] In certain embodiments, the overhang on the sense strand or the antisense strand, or both, can include extended lengths longer than 10 nucleotides, e.g., 1-30 nucleotides, 2-30 nucleotides, 10-30 nucleotides, or 10-15 nucleotides in length. In certain embodiments, an extended overhang is on the sense strand of the duplex. In certain embodiments, an extended overhang is present on the 3′end of the sense strand of the duplex. In certain embodiments, an extended overhang is present on the 5′end of the sense strand of the duplex. In certain embodiments, an extended overhang is on the antisense strand of the duplex. In certain embodiments, an extended overhang is present on the 3′end of the antisense strand of the duplex. In certain embodiments, an extended overhang is present on the 5′end of the antisense strand of the duplex. In certain embodiments, one or more of the nucleotides in the overhang is replaced with a nucleoside thiophosphate. In certain embodiments, the overhang includes a self-complementary portion such that the overhang is capable of forming a hairpin structure that is stable under physiological conditions.

[0393] The terms “blunt” or “blunt ended” as used herein in reference to a dsRNA mean that there are no unpaired nucleotides or nucleotide analogs at a given terminal end of a dsRNA, i.e., no nucleotide overhang. One or both ends of a dsRNA can be blunt. Where both ends of a dsRNA are blunt, the dsRNA is said to be blunt ended. To be clear, a “blunt ended” dsRNA is a dsRNA that is blunt at both ends, i.e., no nucleotide overhang at either end of the molecule. Most often such a molecule will be double stranded over its entire length.

[0394] The term “antisense strand” or “guide strand” refers to the strand of a RNAi agent, e.g., a dsRNA, which includes a region that is substantially complementary to a target sequence, e.g., a SOD1 mRNA.

[0395] As used herein, the term “region of complementarity” refers to the region on the antisense strand that is substantially complementary to a sequence, for example a target sequence, e.g., a SOD1 nucleotide sequence, as defined herein. Where the region of complementarity is not fully complementary to the target sequence, the mismatches can be in the internal or terminal regions of the molecule. Generally, the most tolerated mismatches are in the terminal regions, e.g., within 5, 4, 3, or 2 nucleotides of the 5′- or 3′-terminus of the RNAi agent.

[0396] In some embodiments, a double stranded RNA agent of the invention includes a nucleotide mismatch in the antisense strand. In some embodiments, the antisense strand of the double stranded RNA agent of the invention includes no more than 4 mismatches with the target mRNA, e.g., the antisense strand includes 4, 3, 2, 1, or 0 mismatches with the target mRNA. In some embodiments, the antisense strand double stranded RNA agent of the invention includes no more than 4 mismatches with the sense strand, e.g., the antisense strand includes 4, 3, 2, 1, or 0 mismatches with the sense strand. In some embodiments, a double stranded RNA agent of the invention includes a nucleotide mismatch in the sense strand. In some embodiments, the sense strand of the double stranded RNA agent of the invention includes no more than 4 mismatches with the antisense strand, e.g., the sense strand includes 4, 3, 2, 1, or 0 mismatches with the antisense strand. In some embodiments, the nucleotide mismatch is, for example, within 5, 4, 3 nucleotides from the 3′-end of the iRNA. In another embodiment, the nucleotide mismatch is, for example, in the 3′-terminal nucleotide of the iRNA agent. In some embodiments, the mismatch(s) is not in the seed region.

[0397] Thus, an RNAi agent as described herein can contain one or more mismatches to the target sequence. In one embodiment, a RNAi agent as described herein contains no more than 3 mismatches (i.e., 3, 2, 1, or 0 mismatches). In one embodiment, an RNAi agent as described herein contains no more than 2 mismatches. In one embodiment, an RNAi agent as described herein contains no more than 1 mismatch. In one embodiment, an RNAi agent as described herein contains 0 mismatches. In certain embodiments, if the antisense strand of the RNAi agent contains mismatches to the target sequence, the mismatch can optionally be restricted to be within the last 5 nucleotides from either the 5′- or 3′-end of the region of complementarity. For example, in such embodiments, for a 23 nucleotide RNAi agent, the strand which is complementary to a region of a SOD1 gene, generally does not contain any mismatch within the central 13 nucleotides. The methods described herein or methods known in the art can be used to determine whether an RNAi agent containing a mismatch to a target sequence is effective in inhibiting the expression of a SOD1 gene. Consideration of the efficacy of RNAi agents with mismatches in inhibiting expression of a SOD1 gene is important, especially if the particular region of complementarity in a SOD1 gene is known to have polymorphic sequence variation within the population.

[0398] The term “sense strand” or “passenger strand” as used herein, refers to the strand of a RNAi agent that includes a region that is substantially complementary to a region of the antisense strand as that term is defined herein.

[0399] As used herein, “substantially all of the nucleotides are modified” are largely but not wholly modified and can include not more than 5, 4, 3, 2, or 1 unmodified nucleotides.

[0400] As used herein, the term “cleavage region” refers to a region that is located immediately adjacent to the cleavage site. The cleavage site is the site on the target at which cleavage occurs. In some embodiments, the cleavage region comprises three bases on either end of, and immediately adjacent to, the cleavage site. In some embodiments, the cleavage region comprises two bases on either end of, and immediately adjacent to, the cleavage site. In some embodiments, the cleavage site specifically occurs at the site bound by nucleotides 10 and 11 of the antisense strand, and the cleavage region comprises nucleotides 11, 12 and 13.

[0401] As used herein, and unless otherwise indicated, the term “complementary,” when used to describe a first nucleotide sequence in relation to a second nucleotide sequence, refers to the ability of an oligonucleotide or polynucleotide comprising the first nucleotide sequence to hybridize and form a duplex structure under certain conditions with an oligonucleotide or polynucleotide comprising the second nucleotide sequence, as will be understood by the skilled person. Such conditions can be, for example, “stringent conditions”, where stringent conditions can include: 400 mM NaCl, 40 mM PIPES pH 6.4, 1 mM EDTA, 50° C. or 70° C. for 12-16 hours followed by washing (see, e.g., “Molecular Cloning: A Laboratory Manual, Sambrook, et al. (1989) Cold Spring Harbor Laboratory Press). Other conditions, such as physiologically relevant conditions as can be encountered inside an organism, can apply. The skilled person will be able to determine the set of conditions most appropriate for a test of complementarity of two sequences in accordance with the ultimate application of the hybridized nucleotides.

[0402] Complementary sequences within a RNAi agent, e.g., within a dsRNA as described herein, include base-pairing of the oligonucleotide or polynucleotide comprising a first nucleotide sequence to an oligonucleotide or polynucleotide comprising a second nucleotide sequence over the entire length of one or both nucleotide sequences. Such sequences can be referred to as “fully complementary” with respect to each other herein. However, where a first sequence is referred to as “substantially complementary” with respect to a second sequence herein, the two sequences can be fully complementary, or they can form one or more, but generally not more than 5, 4, 3, or 2 mismatched base pairs upon hybridization for a duplex up to 30 base pairs, while retaining the ability to hybridize under the conditions most relevant to their ultimate application, e.g., inhibition of gene expression, in vitro or in vivo. However, where two oligonucleotides are designed to form, upon hybridization, one or more single stranded overhangs, such overhangs shall not be regarded as mismatches with regard to the determination of complementarity. For example, a dsRNA comprising one oligonucleotide 21 nucleotides in length and another oligonucleotide 23 nucleotides in length, wherein the longer oligonucleotide comprises a sequence of 21 nucleotides that is fully complementary to the shorter oligonucleotide, can yet be referred to as “fully complementary” for the purposes described herein.

[0403] “Complementary” sequences, as used herein, can also include, or be formed entirely from, non-Watson-Crick base pairs or base pairs formed from non-natural and modified nucleotides, in so far as the above requirements with respect to their ability to hybridize are fulfilled. Such non-Watson-Crick base pairs include, but are not limited to, G:U Wobble or Hoogsteen base pairing.

[0404] The terms “complementary,” “fully complementary” and “substantially complementary” herein can be used with respect to the base matching between the sense strand and the antisense strand of a dsRNA, or between two oligonucleotides or polynucleotides, such as the antisense strand of a RNAi agent and a target sequence, as will be understood from the context of their use.

[0405] As used herein, a polynucleotide that is “substantially complementary to at least part of” a messenger RNA (mRNA) refers to a polynucleotide that is substantially complementary to a contiguous portion of the mRNA of interest (e.g., an mRNA encoding SOD1). For example, a polynucleotide is complementary to at least a part of a SOD1 mRNA if the sequence is substantially complementary to a non-interrupted portion of an mRNA encoding SOD1.

[0406] Accordingly, in some embodiments, the antisense strand polynucleotides disclosed herein are fully complementary to the target SOD1 sequence.

[0407] In other embodiments, the antisense strand polynucleotides disclosed herein are substantially complementary to the target SOD1 sequence and comprise a contiguous nucleotide sequence which is at least about 80% complementary over its entire length to the equivalent region of the nucleotide sequence of SEQ ID NOs: 1, 3, 5, 7, or 9 for SOD1, or a fragment of SEQ ID NOs: 1, 3, 5, 7, or 9, such as about 85%, about 90%, or about 95% complementary.

[0408] In other embodiments, the antisense polynucleotides disclosed herein are substantially complementary to the target SOD1 sequence and comprise a contiguous nucleotide sequence which is at least about 80% complementary over its entire length to any one of the sense strand nucleotide sequences in any one of Tables 2-7, 12, 13, and 18-20, or a fragment of any one of the sense strand nucleotide sequences in any one of Tables 2-7, 12, 13, and 18-20, such as about 85%, about 90%, or about 95% complementary.

[0409] In one embodiment, an RNAi agent of the disclosure includes a sense strand that is substantially complementary to an antisense polynucleotide which, in turn, is the same as a target SOD1 sequence, and wherein the sense strand polynucleotide comprises a contiguous nucleotide sequence which is at least about 80% complementary over its entire length to the equivalent region of the nucleotide sequence of SEQ ID NOs: 2, 4, 6, 8, or 10, or a fragment of any one of SEQ ID NOs: 2, 4, 6, 8, or 10, such as about 85%, about 90%, or about 95% complementary.

[0410] In some embodiments, an iRNA of the invention includes a sense strand that is substantially complementary to an antisense polynucleotide which, in turn, is complementary to a target SOD1 sequence, and wherein the sense strand polynucleotide comprises a contiguous nucleotide sequence which is at least about 80% complementary over its entire length to any one of the antisense strand nucleotide sequences in any one of any one of Tables 2-7, 12, 13, and 18-20, or a fragment of any one of the antisense strand nucleotide sequences in any one of Tables 2-7, 12, 13, and 18-20, such as about 85%, about 90%, or about 95% complementary.

[0411] In some embodiments, the double-stranded region of a double-stranded iRNA agent is equal to or at least, 10, 11, 12, 13, 14, 15, 16, 17, 18, 19, 20, 21, 22, 23, 23, 24, 25, 26, 27, 28, 29, 30 or more nucleotide pairs in length.

[0412] In some embodiments, the antisense strand of a double-stranded iRNA agent is equal to or at least 14, 15, 16, 17, 18, 19, 20, 21, 22, 23, 23, 24, 25, 26, 27, 28, 29, or 30 nucleotides in length.

[0413] In some embodiments, the sense strand of a double-stranded iRNA agent is equal to or at least 10, 11, 12, 13, 14, 15, 16, 17, 18, 19, 20, 21, 22, 23, 23, 24, 25, 26, 27, 28, 29, or 30 nucleotides in length.

[0414] In one embodiment, the sense and antisense strands of the double-stranded iRNA agent are each independently 15 to 30 nucleotides in length.

[0415] In one embodiment, the sense and antisense strands of the double-stranded iRNA agent are each independently 19 to 25 or 19 to 30 nucleotides in length.

[0416] In one embodiment, the sense and antisense strands of the double-stranded iRNA agent are each independently 21 to 23 nucleotides in length.

[0417] In one embodiment, the sense strand of the iRNA agent is 21-nucleotides in length, and the antisense strand is 23-nucleotides in length, wherein the strands form a double-stranded region of 21 consecutive base pairs having a 2-nucleotide long single stranded overhangs at the 3-end.

[0418] In one aspect of the invention, an agent for use in the methods and compositions of the invention is a single-stranded antisense nucleic acid molecule that inhibits a target mRNA via an antisense inhibition mechanism. The single-stranded antisense RNA molecule is complementary to a sequence within the target mRNA. The single-stranded antisense oligonucleotides can inhibit translation in a stoichiometric manner by base pairing to the mRNA and physically obstructing the translation machinery, see Dias, N. et al., (2002) Mol Cancer Ther 1:347-355. The single-stranded antisense RNA molecule may be about 15 to about 30 nucleotides in length and have a sequence that is complementary to a target sequence. For example, the single-stranded antisense RNA molecule may comprise a sequence that is at least about 15, 16, 17, 18, 19, 20, or more contiguous nucleotides from any one of the antisense sequences described herein.

[0419] In one embodiment, at least partial suppression of the expression of a SOD1 gene, is assessed by a reduction of the amount of SOD1 mRNA which can be isolated from or detected in a first cell or group of cells in which a SOD1 gene is transcribed and which has or have been treated such that the expression of a SOD1 gene is inhibited, as compared to a second cell or group of cells substantially identical to the first cell or group of cells but which has or have not been so treated (control cells). The degree of inhibition may be expressed in terms of:

$$\\ \frac{( mRNA in control cells ) - ( mRNA in treated cells )}{( mRNA in control cells )} \cdot 100 \%$$

[0420] In one embodiment, inhibition of expression is determined by the dual luciferase method in Example 1 wherein the RNAi agent is present at 10 nM.

[0421] The phrase “contacting a cell with an RNAi agent,” such as a dsRNA, as used herein, includes contacting a cell by any possible means. Contacting a cell with an RNAi agent includes contacting a cell in vitro with the RNAi agent or contacting a cell in vivo with the RNAi agent. The contacting may be done directly or indirectly. Thus, for example, the RNAi agent may be put into physical contact with the cell by the individual performing the method, or alternatively, the RNAi agent may be put into a situation that will permit or cause it to subsequently come into contact with the cell.

[0422] Contacting a cell in vitro may be done, for example, by incubating the cell with the RNAi agent. Contacting a cell in vivo may be done, for example, by injecting the RNAi agent into or near the tissue where the cell is located, or by injecting the RNAi agent into another area, e.g., the central nervous system (CNS), optionally via intrathecal, intracerebroventricular or other injection, or to the bloodstream or the subcutaneous space, such that the agent will subsequently reach the tissue where the cell to be contacted is located. For example, the RNAi agent may contain or be coupled to a ligand, e.g., a lipophilic moiety or moieties as described below and further detailed, e.g., in PCT Publication No. WO 2019/217459, which is incorporated herein by reference, that directs or otherwise stabilizes the RNAi agent at a site of interest, e.g., the CNS. In some embodiments, the RNAi agent may contain or be coupled to a ligand, e.g., one or more GalNAc derivatives as described below, that directs or otherwise stabilizes the RNAi agent at a site of interest, e.g., the liver. In other embodiments, the RNAi agent may contain or be coupled to a lipophilic moiety or moieties and one or more GalNAc derivatives. Combinations of in vitro and in vivo methods of contacting are also possible. For example, a cell may also be contacted in vitro with an RNAi agent and subsequently transplanted into a subject.

[0423] In one embodiment, contacting a cell with an RNAi agent includes “introducing” or “delivering the RNAi agent into the cell” by facilitating or effecting uptake or absorption into the cell. Absorption or uptake of a RNAi agent can occur through unaided diffusive or active cellular processes, or by auxiliary agents or devices. Introducing a RNAi agent into a cell may be in vitro or in vivo. For example, for in vivo introduction, a RNAi agent can be injected into a tissue site or administered systemically. In vitro introduction into a cell includes methods known in the art such as electroporation and lipofection. Further approaches are described herein below or are known in the art.

[0424] The term “lipophile” or “lipophilic moiety” broadly refers to any compound or chemical moiety having an affinity for lipids. One way to characterize the lipophilicity of the lipophilic moiety is by the octanol-water partition coefficient, log K_{ow}, where K_{ow} is the ratio of a chemical's concentration in the octanol-phase to its concentration in the aqueous phase of a two-phase system at equilibrium. The octanol-water partition coefficient is a laboratory-measured property of a substance. However, it may also be predicted by using coefficients attributed to the structural components of a chemical which are calculated using first-principle or empirical methods (see, for example, Tetko et al., J. Chem. Inf Comput. Sci. 41:1407-21 (2001), which is incorporated herein by reference in its entirety). It provides a thermodynamic measure of the tendency of the substance to prefer a non-aqueous or oily milieu rather than water (i.e. its hydrophilic/lipophilic balance). In principle, a chemical substance is lipophilic in character when its log K_{ow} exceeds 0. Typically, the lipophilic moiety possesses a log K_{ow} exceeding 1, exceeding 1.5, exceeding 2, exceeding 3, exceeding 4, exceeding 5, or exceeding 10. For instance, the log K_{ow} of 6-amino hexanol, for instance, is predicted to be approximately 0.7. Using the same method, the log K_{ow} of cholesteryl N-(hexan-6-ol) carbamate is predicted to be 10.7.

[0425] The lipophilicity of a molecule can change with respect to the functional group it carries. For instance, adding a hydroxyl group or amine group to the end of a lipophilic moiety can increase or decrease the partition coefficient (e.g., log K_{ow}) value of the lipophilic moiety.

[0426] Alternatively, the hydrophobicity of the double-stranded RNAi agent, conjugated to one or more lipophilic moieties, can be measured by its protein binding characteristics. For instance, in certain embodiments, the unbound fraction in the plasma protein binding assay of the double-stranded RNAi agent could be determined to positively correlate to the relative hydrophobicity of the double-stranded RNAi agent, which could then positively correlate to the silencing activity of the double-stranded RNAi agent.

[0427] In one embodiment, the plasma protein binding assay determined is an electrophoretic mobility shift assay (EMSA) using human serum albumin protein. An exemplary protocol of this binding assay is illustrated in detail in, e.g., PCT Publication No. WO 2019/217459. The hydrophobicity of the double-stranded RNAi agent, measured by fraction of unbound siRNA in the binding assay, exceeds 0.15, exceeds 0.2, exceeds 0.25, exceeds 0.3, exceeds 0.35, exceeds 0.4, exceeds 0.45, or exceeds 0.5 for an enhanced in vivo delivery of siRNA.

[0428] Accordingly, conjugating the lipophilic moieties to the internal position(s) of the double-stranded RNAi agent provides optimal hydrophobicity for the enhanced in vivo delivery of siRNA.

[0429] The term “lipid nanoparticle” or “LNP” is a vesicle comprising a lipid layer encapsulating a pharmaceutically active molecule, such as a nucleic acid molecule, e.g., a RNAi agent or a plasmid from which a RNAi agent is transcribed. LNPs are described in, for example, U.S. Pat. Nos. 6,858,225, 6,815,432, 8,158,601, and 8,058,069, the entire contents of which are hereby incorporated herein by reference.

[0430] As used herein, a “subject” is an animal, such as a mammal, including a primate (such as a human, a non-human primate, e.g., a monkey, and a chimpanzee), or a non-primate (such as a a rat, or a mouse). In a preferred embodiment, the subject is a human, such as a human being treated or assessed for a disease, disorder, or condition that would benefit from reduction in SOD1 expression; a human at risk for a disease, disorder, or condition that would benefit from reduction in SOD1 expression; a human having a disease, disorder, or condition that would benefit from reduction in SOD1 expression; or human being treated for a disease, disorder, or condition that would benefit from reduction in SOD1 expression as described herein.

[0431] As used herein, the terms “treating” or “treatment” refer to a beneficial or desired result including, but not limited to, alleviation or amelioration of one or more signs or symptoms associated with SOD1 gene expression or SOD1 protein production, e.g., SOD1-associated neurodegenerative disease, e.g., Amyotrophic Lateral Sclerosis (ALS), Alzheimer's disease (AD), Parkinson's disease (PD), and Down's syndrome (DS), decreased expression, deposition, and/or activity of SOD1 in regions of increased neuronal death in subjects having such neurodegenerative diseases. “Treatment” can also mean prolonging survival as compared to expected survival in the absence of treatment.

[0432] The term “lower” in the context of the level of SOD1 in a subject or a disease marker or symptom refers to a statistically significant decrease in such level. The decrease can be, for example, at least 10%, 15%, 20%, 25%, 30%, %, 40%, 45%, 50%, 55%, 60%, 65%, 70%, 75%, 80%, 85%, 90%, 95%, or more. In certain embodiments, a decrease is at least 20%. In certain embodiments, the decrease is at least 50% in a disease marker, e.g., protein or gene expression level. “Lower” in the context of the level of SOD1 in a subject is preferably down to a level accepted as within the range of normal for an individual without such disorder. In certain embodiments, “lower” is the decrease in the difference between the level of a marker or symptom for a subject suffering from a disease and a level accepted within the range of normal for an individual, e.g., the level of decrease in bodyweight between an obese individual and an individual having a weight accepted within the range of normal.

[0433] As used herein, “prevention” or “preventing,” when used in reference to a disease, disorder, or condition thereof, that would benefit from a reduction in expression of a SOD1 gene or production of a SOD1 protein, refers to a reduction in the likelihood that a subject will develop a symptom associated with such a disease, disorder, or condition, e.g., a symptom of a SOD1-associated neurodegenerative disease. The failure to develop a disease, disorder, or condition, or the reduction in the development of a symptom associated with such a disease, disorder, or condition, e.g., neuroinflammation (e.g., by at least about 10% on a clinically accepted scale for that disease or disorder), or the exhibition of delayed symptoms delayed (e.g., by days, weeks, months or years) is considered effective prevention.

[0434] As used herein, the term “SOD1-associated neurodegenerative disease” or “SOD1-associated neurodegenerative disorder” is understood as any disease or disorder that would benefit from reduction in the expression or activity of SOD1. Such SOD1-neurodegenerative diseases are characterized by SOD1 protein misfolding, e.g., increased SOD1 deposition in areas of the brain associated with neuronal cell death in such diseases (see, e.g., Trist B, et al. (2020) Angew Chem Int Ed Engl. Accepted Author Manuscript), e.g., Amyotrophic Lateral Sclerosis (ALS), Alzheimer's disease (AD), Parkinson's disease (PD), and Down's syndrome (DS).

[0435] In one embodiment, a SOD1-associated neurodegenerative disease is “Amyotrophic Lateral Sclerosis” (“ALS”), also known as Lou Gehrig's disease.

[0436] Amyotrophic lateral sclerosis (ALS) is a progressive disease that affects motor neurons in the spinal cord and the brain. In ALS, motor neurons die (atrophy) over time, leading to muscle weakness, a loss of muscle mass, and an inability to control movement.

[0437] Mutations in the SOD1 gene cause approximately 20% of inherited familial amyotrophic lateral sclerosis (fALS) cases and up to approximately 5% of sporadic ALS (sALS) cases. The resulting mutations, including, e.g., amino-acid substitutions, insertions, deletions, and/or genetic polymorphisms, destabilize SOD1's protein structure, leading to its misfolding and self-assembly into neurotoxic oligomers and aggregates, a process that contributes to the characteristic motor neuron degeneration in affected individuals.

[0438] People with sporadic ALS usually first develop features of the condition in their late fifties or early sixties. Sporadic and familial ALS present similar pathological and clinical profiles.

[0439] The earliest symptoms of ALS include muscle twitching, cramping, stiffness, or weakness. Affected individuals may develop slurred speech (dysarthria) and, later, difficulty chewing or swallowing (dysphagia). Many people with ALS experience malnutrition because of reduced food intake due to dysphagia and an increase in their body's energy demands (metabolism) due to prolonged illness. Muscles become weaker as the disease progresses, and arms and legs begin to look thinner as muscle tissue atrophies. Individuals with ALS eventually lose muscle strength and the ability to walk. Affected individuals eventually become wheelchair-dependent and increasingly require help with personal care and other activities of daily living. Over time, muscle weakness causes affected individuals to lose the use of their hands and arms. Breathing becomes difficult because the muscles of the respiratory system weaken. Most people with ALS die from respiratory failure within 2 to 10 years after the signs and symptoms of ALS first appear; however, disease progression varies widely among affected individuals.

[0440] SOD1 accumulation has been found in the motor neurons, spinal cord, and associated cells of postmortem mutant SOD1 transgenic mice and human ALS patient tissues. Furthermore, SOD1 transgenic mice, an art-recognized model of ALS, which express mutated SOD1 forms in similar or elevated levels as to the endogenous mouse protein have been shown to recapitulate the ALS-phenotype. These mice develop severe degeneration of motor neurons which leads to progressive paralysis of the hindlimbs and forelimbs and death, as seen in ALS human patients. These mice also present pathology found in postmortem tissues from human patients, such as SOD1 cytoplasmic inclusions, gliosis, glutamate excitotoxicity, vacuolization of mitochondria, and disrupted axonal transport (Mina M, et al. (2018) J Transl Neurosci. 3:9).

[0441] In one embodiment, a SOD1-associated neurodegenerative disease is “Alzheimer's disease” (“AD”). AD is a chronic neurodegenerative disease that usually starts slowly and gradually worsens over time. The most common early symptom is difficulty in remembering recent events. As the disease advances, symptoms can include problems with language, disorientation (including easily getting lost), mood swings, loss of motivation, not managing self-care, and behavioral issues. As a person's condition declines, they often withdraw from family and society. Gradually, bodily functions are lost, ultimately leading to death.

[0442] Neuropathologically, AD is characterised by loss of neurons and synapses in the cerebral cortex and certain subcortical regions. This loss results in gross atrophy of the affected regions, including degeneration in the temporal lobe and parietal lobe, and parts of the frontal cortex and cingulate gyrus. Degeneration is also present in brainstem nuclei like the locus coeruleus. Studies using MRI and PET have documented reductions in the size of specific brain regions in people with AD as they progressed from mild cognitive impairment to Alzheimer's disease, and in comparison with similar images from healthy older adults.

[0443] Both amyloid plaques and neurofibrillary tangles are clearly visible by microscopy in brains of those afflicted by AD. Plaques are dense, mostly insoluble deposits of beta-amyloid peptide and cellular material outside and around neurons. Tangles (neurofibrillary tangles) are aggregates of the microtubule-associated protein tau which has become hyperphosphorylated and accumulate inside the cells themselves. Although many older individuals develop some plaques and tangles as a consequence of ageing, the brains of people with AD have a greater number of them in specific brain regions such as the temporal lobe. Lewy bodies are not rare in the brains of people with AD.

[0444] The post-mortem and in vivo examinations of individuals with AD have also showed an accumulation of products of free radicals damage in the central nervous system and in the peripheral tissues. Additionally, SOD1 aggregates have been identified in AD brains and we shown to be associated with amyloid senile plaques and neurofibrillary tangles (Choi J, et al. (2005) JBC. 280:11648-11655).

[0445] In one embodiment, SOD1-associated neurodegenerative disease is “Parkinson's disease” (“PD”). Parkinson disease is a progressive disorder of the nervous system. The disorder affects several regions of the brain, especially an area called the substantia nigra that controls balance and movement. PD leads to loss of dopaminergic neurons within the basal ganglia.

[0446] Often the first symptom of Parkinson disease is trembling or shaking (tremor) of a limb, especially when the body is at rest. Typically, the tremor begins on one side of the body, usually in one hand. Tremors can also affect the arms, legs, feet, and face. Other characteristic symptoms of Parkinson disease include rigidity or stiffness of the limbs and torso, slow movement (bradykinesia) or an inability to move (akinesia), and impaired balance and coordination (postural instability). These symptoms worsen slowly over time.

[0447] Parkinson disease can also affect emotions and thinking ability (cognition). Some affected individuals develop psychiatric conditions such as depression and visual hallucinations. People with Parkinson disease also have an increased risk of developing dementia, which is a decline in intellectual functions including judgment and memory.

[0448] Previous studies have demonstrated that the total level of SOD1 protein is significantly increased the brains of PD patients (Choi J, et al. (2005) JBC. 280:11648-11655). Additionally, deposition of SOD1 in Lewy bodies in the brains of PD patients has beed detected (Nishiyama L, et al. (1995) Acta Neuropathologica, 89:471-474).

[0449] In one embodiment, a SOD1-associated neurodegenerative disease is “Down's syndrome (DS)”. Down syndrome (“DS”) is caused by trisomy of human chromosome 21 (Hsa21) and the increased expression, due to dosage, of some subset of the encoded genes. DS patients present different morphological characteristics, for example, short height, obesity and bilateral epicanthic eyefolds. Additionally, muscular hypotonia and neurodegeneration with age may be noted during life. The syndrome is associated with mental retardation, congenital heart disease, immune system disorders, digestive problems, endocrine system deficits, and different biochemical disorders. Evidence from in vivo, in vitro, and animal models studies have shown that oxidative stress is involved in DS. Thus, it has been proposed that the increased oxidative stress observed in these subjects is mainly caused to an excessive activity of SOD1, an enzyme coded on HSA21 (21q22.1). Patients with DS have also shown elevated levels of SOD1 and appear to have increased lipid peroxidation and oxidative damage to DNA as well as elevated glutathione peroxidase activity (Campos C and Casado A. (2015) Indian J Med Res. 142(2):113-119).

[0450] “Therapeutically effective amount,” as used herein, is intended to include the amount of an RNAi agent that, when administered to a subject having a SOD1-associated neurodegenerative disease, is sufficient to effect treatment of the disease (e.g., by diminishing, ameliorating, or maintaining the existing disease or one or more symptoms of disease). The “therapeutically effective amount” may vary depending on the RNAi agent, how the agent is administered, the disease and its severity and the history, age, weight, family history, genetic makeup, the types of preceding or concomitant treatments, if any, and other individual characteristics of the subject to be treated.

[0451] “Prophylactically effective amount,” as used herein, is intended to include the amount of a RNAi agent that, when administered to a subject having a SOD1-associated neurodegenerative disorder, is sufficient to prevent or ameliorate the disease or one or more symptoms of the disease. Ameliorating the disease includes slowing the course of the disease or reducing the severity of later-developing disease. The “prophylactically effective amount” may vary depending on the RNAi agent, how the agent is administered, the degree of risk of disease, and the history, age, weight, family history, genetic makeup, the types of preceding or concomitant treatments, if any, and other individual characteristics of the patient to be treated.

[0452] A “therapeutically-effective amount” or “prophylactically effective amount” also includes an amount of a RNAi agent that produces some desired local or systemic effect at a reasonable benefit/risk ratio applicable to any treatment. A RNAi agent employed in the methods of the present disclosure may be administered in a sufficient amount to produce a reasonable benefit/risk ratio applicable to such treatment.

[0453] The phrase “pharmaceutically acceptable” is employed herein to refer to those compounds (including salts), materials, compositions, or dosage forms which are, within the scope of sound medical judgment, suitable for use in contact with the tissues of human subjects and animal subjects without excessive toxicity, irritation, allergic response, or other problem or complication, commensurate with a reasonable benefit/risk ratio.

[0454] The phrase “pharmaceutically-acceptable carrier” as used herein means a pharmaceutically-acceptable material, composition or vehicle, such as a liquid or solid filler, diluent, excipient, manufacturing aid (e.g., lubricant, talc magnesium, calcium or zinc stearate, or steric acid), or solvent encapsulating material, involved in carrying or transporting the subject compound from one organ, or portion of the body, to another organ, or portion of the body. Each carrier must be “acceptable” in the sense of being compatible with the other ingredients of the formulation and not injurious to the subject being treated. Some examples of materials which can serve as pharmaceutically-acceptable carriers include: (1) sugars, such as lactose, glucose and sucrose; (2) starches, such as corn starch and potato starch; (3) cellulose, and its derivatives, such as sodium carboxymethyl cellulose, ethyl cellulose and cellulose acetate; (4) powdered tragacanth; (5) malt; (6) gelatin; (7) lubricating agents, such as magnesium state, sodium lauryl sulfate and talc; (8) excipients, such as cocoa butter and suppository waxes; (9) oils, such as peanut oil, cottonseed oil, safflower oil, sesame oil, olive oil, corn oil and soybean oil; (10) glycols, such as propylene glycol; (11) polyols, such as glycerin, sorbitol, mannitol and polyethylene glycol; (12) esters, such as ethyl oleate and ethyl laurate; (13) agar; (14) buffering agents, such as magnesium hydroxide and aluminum hydroxide; (15) alginic acid; (16) pyrogen-free water; (17) isotonic saline; (18) Ringer's solution; (19) ethyl alcohol; (20) pH buffered solutions; (21) polyesters, polycarbonates or polyanhydrides; (22) bulking agents, such as polypeptides and amino acids (23) serum component, such as serum albumin, HDL and LDL; and (22) other non-toxic compatible substances employed in pharmaceutical formulations.

[0455] The term “sample,” as used herein, includes a collection of similar fluids, cells, or tissues isolated from a subject, as well as fluids, cells, or tissues present within a subject. Examples of biological fluids include blood, serum and serosal fluids, plasma, cerebrospinal fluid, ocular fluids, lymph, urine, saliva, and the like. Tissue samples may include samples from tissues, organs or localized regions. For example, samples may be derived from particular organs, parts of organs, or fluids or cells within those organs. In certain embodiments, samples may be derived from the brain (e.g., whole brain or certain segments of brain, e.g., striatum, or certain types of cells in the brain, such as, e.g., neurons and glial cells (astrocytes, oligodendrocytes, microglial cells)). In other embodiments, a “sample derived from a subject” refers to liver tissue (or subcomponents thereof) derived from the subject. In some embodiments, a “sample derived from a subject” refers to blood drawn from the subject or plasma or serum derived therefrom. In further embodiments, a “sample derived from a subject” refers to brain tissue (or subcomponents thereof) or retinal tissue (or subcomponents thereof) derived from the subject.

### II. RNAi Agents of the Disclosure

[0456] Described herein are RNAi agents which inhibit the expression of a SOD1 gene. In one embodiment, the RNAi agent includes double stranded ribonucleic acid (dsRNA) molecules for inhibiting the expression of a SOD1 gene in a cell, such as a cell within a subject, e.g., a mammal, such as a human having a SOD1-associated neurodegenerative disease, e.g., Amyotrophic Lateral Sclerosis (ALS), Alzheimer's disease (AD), Parkinson's disease (PD), and Down's syndrome (DS). The dsRNA includes an antisense strand having a region of complementarity which is complementary to at least a part of an mRNA formed in the expression of a SOD1 gene. The region of complementarity is about 15-30 nucleotides or less in length. Upon contact with a cell expressing the SOD1 gene, the RNAi agent inhibits the expression of the SOD1 gene (e.g., a human gene, a primate gene, a non-primate gene) by at least 50% as assayed by, for example, a PCR or branched DNA (bDNA)-based method, or by a protein-based method, such as by immunofluorescence analysis, using, for example, western blotting or flowcytometric techniques. In preferred embodiments, inhibition of expression is by at least 50% as assayed by the Dual-Glo lucifierase assay in Example 1 where the siRNA is at a 10 nM concentration.

[0457] A dsRNA includes two RNA strands that are complementary and hybridize to form a duplex structure under conditions in which the dsRNA will be used. One strand of a dsRNA (the antisense strand) includes a region of complementarity that is substantially complementary, and generally fully complementary, to a target sequence. The target sequence can be derived from the sequence of an mRNA formed during the expression of a SOD1 gene. The other strand (the sense strand) includes a region that is complementary to the antisense strand, such that the two strands hybridize and form a duplex structure when combined under suitable conditions. As described elsewhere herein and as known in the art, the complementary sequences of a dsRNA can also be contained as self-complementary regions of a single nucleic acid molecule, as opposed to being on separate oligonucleotides.

[0458] Generally, the duplex structure is 15 to 30 base pairs in length, e.g., 15-29, 15-28, 15-27, 15-26, 15-25, 15-24, 15-23, 15-22, 15-21, 15-20, 15-19, 15-18, 15-17, 18-30, 18-29, 18-28, 18-27, 18-26, 18-25, 18-24, 18-23, 18-22, 18-21, 18-20, 19-30, 19-29, 19-28, 19-27, 19-26, 19-25, 19-24, 19-23, 19-22, 19-21, 19-20, 20-30, 20-29, 20-28, 20-27, 20-26, 20-25, 20-24,20-23, 20-22, 20-21, 21-30, 21-29, 21-28, 21-27, 21-26, 21-25, 21-24, 21-23, or 21-22 base pairs in length. In certain preferred embodiments, the duplex structure is 18 to 25 base pairs in length, e.g., 18-25, 18-24, 18-23, 18-22, 18-21, 18-20, 19-25, 19-24, 19-23, 19-22, 19-21, 19-20, 20-25, 20-24,20-23, 20-22, 20-21, 21-25, 21-24, 21-23, 21-22, 22-25, 22-24, 22-23, 23-25, 23-24 or 24-25 base pairs in length, for example, 19-21 basepairs in length. Ranges and lengths intermediate to the above recited ranges and lengths are also contemplated to be part of the disclosure.

[0459] Similarly, the region of complementarity to the target sequence is 15 to 30 nucleotides in length, e.g., 15-29, 15-28, 15-27, 15-26, 15-25, 15-24, 15-23, 15-22, 15-21, 15-20, 15-19, 15-18, 15-17, 18-30, 18-29, 18-28, 18-27, 18-26, 18-25, 18-24, 18-23, 18-22, 18-21, 18-20, 19-30, 19-29, 19-28, 19-27, 19-26, 19-25, 19-24, 19-23, 19-22, 19-21, 19-20, 20-30, 20-29, 20-28, 20-27, 20-26, 20-25, 20-24,20-23, 20-22, 20-21, 21-30, 21-29, 21-28, 21-27, 21-26, 21-25, 21-24, 21-23, or 21-22 nucleotides in length, for example 19-23 nucleotides in length or 21-23 nucleotides in length. Ranges and lengths intermediate to the above recited ranges and lengths are also contemplated to be part of the disclosure.

[0460] In some embodiments, the dsRNA is 15 to 23 nucleotides in length, 25 to 30 nucleotides in length, 20 to 30 nucleotides in length or 19 to 30 nucleotides in length. In general, the dsRNA is long enough to serve as a substrate for the Dicer enzyme. For example, it is well known in the art that dsRNAs longer than about 21-23 nucleotides can serve as substrates for Dicer. As the ordinarily skilled person will also recognize, the region of an RNA targeted for cleavage will most often be part of a larger RNA molecule, often an mRNA molecule. Where relevant, a “part” of an mRNA target is a contiguous sequence of an mRNA target of sufficient length to allow it to be a substrate for RNAi-directed cleavage (i.e., cleavage through a RISC pathway).

[0461] One of skill in the art will also recognize that the duplex region is a primary functional portion of a dsRNA, e.g., a duplex region of about 15 to 36 base pairs, e.g., 15-36, 15-35, 15-34, 15-33, 15-32, 15-31, 15-30, 15-29, 15-28, 15-27, 15-26, 15-25, 15-24, 15-23, 15-22, 15-21, 15-20, 15-19, 15-18, 15-17, 18-30, 18-29, 18-28, 18-27, 18-26, 18-25, 18-24, 18-23, 18-22, 18-21, 18-20, 19-30, 19-29, 19-28, 19-27, 19-26, 19-25, 19-24, 19-23, 19-22, 19-21, 19-20, 20-30, 20-29, 20-28, 20-27, 20-26, 20-25, 20-24,20-23, 20-22, 20-21, 21-30, 21-29, 21-28, 21-27, 21-26, 21-25, 21-24, 21-23, or 21-22 base pairs, for example, 19-21 base pairs. Thus, in one embodiment, to the extent that it becomes processed to a functional duplex, of e.g., 15-30 base pairs, that targets a desired RNA for cleavage, an RNA molecule or complex of RNA molecules having a duplex region greater than 30 base pairs is a dsRNA. Thus, an ordinarily skilled artisan will recognize that in one embodiment, a miRNA is a dsRNA. In another embodiment, a dsRNA is not a naturally occurring miRNA. In another embodiment, a RNAi agent useful to target SOD1 expression is not generated in the target cell by cleavage of a larger dsRNA.

[0462] A dsRNA as described herein can further include one or more single-stranded nucleotide overhangs e.g., 1, 2, 3, or 4 nucleotides. A nucleotide overhang can comprise or consist of a nucleotide/nucleoside analog, including a deoxynucleotide/nucleoside. The overhang(s) can be on the sense strand, the antisense strand or any combination thereof. Furthermore, the nucleotide(s) of an overhang can be present on the 5′-end, 3′-end or both ends of either an antisense or sense strand of a dsRNA. In certain embodiments, longer, extended overhangs are possible.

[0463] A dsRNA can be synthesized by standard methods known in the art as further discussed below, e.g., by use of an automated DNA synthesizer, such as are commercially available from, for example, Biosearch, Applied Biosystems, Inc.

[0464] iRNA compounds of the invention may be prepared using a two-step procedure. First, the individual strands of the double stranded RNA molecule are prepared separately. Then, the component strands are annealed. The individual strands of the siRNA compound can be prepared using solution-phase or solid-phase organic synthesis or both. Organic synthesis offers the advantage that the oligonucleotide strands comprising unnatural or modified nucleotides can be easily prepared. Single-stranded oligonucleotides of the invention can be prepared using solution-phase or solid-phase organic synthesis or both.

[0465] An siRNA can be produced, e.g., in bulk, by a variety of methods. Exemplary methods include: organic synthesis and RNA cleavage, e.g., in vitro cleavage.

[0466] An siRNA can be made by separately synthesizing a single stranded RNA molecule, or each respective strand of a double-stranded RNA molecule, after which the component strands can then be annealed.

[0467] A large bioreactor, e.g., the OligoPilot II from Pharmacia Biotec AB (Uppsala Sweden), can be used to produce a large amount of a particular RNA strand for a given siRNA. The OligoPilot II reactor can efficiently couple a nucleotide using only a 1.5 molar excess of a phosphoramidite nucleotide. To make an RNA strand, ribonucleotides amidites are used. Standard cycles of monomer addition can be used to synthesize the 21 to 23 nucleotide strand for the siRNA. Typically, the two complementary strands are produced separately and then annealed, e.g., after release from the solid support and deprotection.

[0468] Organic synthesis can be used to produce a discrete siRNA species. The complementary of the species to a SOD1 gene can be precisely specified. For example, the species may be complementary to a region that includes a polymorphism, e.g., a single nucleotide polymorphism. Further the location of the polymorphism can be precisely defined. In some embodiments, the polymorphism is located in an internal region, e.g., at least 4, 5, 7, or 9 nucleotides from one or both of the termini.

[0469] In one embodiment, RNA generated is carefully purified to remove endsiRNA is cleaved in vitro into siRNAs, for example, using a Dicer or comparable RNAse III-based activity. For example, the dsiRNA can be incubated in an in vitro extract from Drosophila or using purified components, e.g., a purified RNAse or RISC complex (RNA-induced silencing complex). See, e.g., Ketting et al. Genes Dev 2001 Oct. 15; 15(20):2654-9 and Hammond Science 2001 Aug. 10; 293(5532):1146-50.

[0470] dsiRNA cleavage generally produces a plurality of siRNA species, each being a particular 21 to 23 nt fragment of a source dsiRNA molecule. For example, siRNAs that include sequences complementary to overlapping regions and adjacent regions of a source dsiRNA molecule may be present.

[0471] Regardless of the method of synthesis, the siRNA preparation can be prepared in a solution (e.g., an aqueous or organic solution) that is appropriate for formulation. For example, the siRNA preparation can be precipitated and redissolved in pure double-distilled water, and lyophilized. The dried siRNA can then be resuspended in a solution appropriate for the intended formulation process.

[0472] In one aspect, a dsRNA of the disclosure includes at least two nucleotide sequences, a sense sequence and an antisense sequence. The sense strand sequence for SOD1 may be selected from the group of sequences provided in any one of Tables 2-7, 12, 13, and 18-20, and the corresponding nucleotide sequence of the antisense strand of the sense strand may be selected from the group of sequences of any one of Tables 2-7, 12, 13, and 18-20. In this aspect, one of the two sequences is complementary to the other of the two sequences, with one of the sequences being substantially complementary to a sequence of an mRNA generated in the expression of a SOD1 gene. As such, in this aspect, a dsRNA will include two oligonucleotides, where one oligonucleotide is described as the sense strand (passenger strand) in any one of Tables 2-7, 12, 13 and 18-20, and the second oligonucleotide is described as the corresponding antisense strand (guide strand) of the sense strand in any one of Tables 2-7, 12, 13, and 18-20 for SOD1.

[0473] In one embodiment, the substantially complementary sequences of the dsRNA are contained on separate oligonucleotides. In another embodiment, the substantially complementary sequences of the dsRNA are contained on a single oligonucleotide.

[0474] It will be understood that, although the sequences provided herein are described as modified or conjugated sequences, the RNA of the RNAi agent of the disclosure e.g., a dsRNA of the disclosure, may comprise any one of the sequences set forth in any one of Tables 2-7, 12, 13, and 18-20 that is un-modified, un-conjugated, or modified or conjugated differently than described therein. One or more lipophilic ligands or one or more GalNAc ligands can be included in any of the positions of the RNAi agents provided in the instant application.

[0475] The skilled person is well aware that dsRNAs having a duplex structure of about 20 to 23 base pairs, e.g., 21, base pairs have been hailed as particularly effective in inducing RNA interference (Elbashir et al., (2001) EMBO J., 20:6877-6888). However, others have found that shorter or longer RNA duplex structures can also be effective (Chu and Rana (2007) RNA 14:1714-1719; Kim et al. (2005) Nat Biotech 23:222-226). In the embodiments described above, by virtue of the nature of the oligonucleotide sequences provided herein, dsRNAs described herein can include at least one strand of a length of minimally 21 nucleotides. It can be reasonably expected that shorter duplexes minus only a few nucleotides on one or both ends can be similarly effective as compared to the dsRNAs described above. Hence, dsRNAs having a sequence of at least 15, 16, 17, 18, 19, 20, or more contiguous nucleotides derived from one of the sequences provided herein, and differing in their ability to inhibit the expression of a SOD1 gene by not more than 10, 15, 20, 25, or 30% inhibition from a dsRNA comprising the full sequence using the in vitro assay with Cos 7 and a 10 nM concentration of the RNA agent and the PCR assay as provided in the examples herein, are contemplated to be within the scope of the present disclosure.

[0476] In addition, the RNAs described herein identify a site(s) in a SOD1 transcript that is susceptible to RISC-mediated cleavage. As such, the present disclosure further features RNAi agents that target within this site(s). As used herein, a RNAi agent is said to target within a particular site of an RNA transcript if the RNAi agent promotes cleavage of the transcript anywhere within that particular site. Such a RNAi agent will generally include at least about 15 contiguous nucleotides, preferably at least 19 nucleotides, from one of the sequences provided herein coupled to additional nucleotide sequences taken from the region contiguous to the selected sequence in a SOD1 gene.

[0477] An RNAi agent as described herein can contain one or more mismatches to the target sequence. In one embodiment, an RNAi agent as described herein contains no more than 3 mismatches (i.e., 3, 2, 1, or 0 mismatches). In one embodiment, an RNAi agent as described herein contains no more than 2 mismatches. In one embodiment, an RNAi agent as described herein contains no more than 1 mismatch. In one embodiment, an RNAi agent as described herein contains 0 mismatches. In certain embodiments, if the antisense strand of the RNAi agent contains mismatches to the target sequence, the mismatch can optionally be restricted to be within the last 5 nucleotides from either the 5′- or 3′-end of the region of complementarity. For example, in such embodiments, for a 23 nucleotide RNAi agent, the strand which is complementary to a region of a SOD1 gene generally does not contain any mismatch within the central 13 nucleotides. The methods described herein or methods known in the art can be used to determine whether an RNAi agent containing a mismatch to a target sequence is effective in inhibiting the expression of a SOD1 gene. Consideration of the efficacy of RNAi agents with mismatches in inhibiting expression of a SOD1 gene is important, especially if the particular region of complementarity in a SOD1 gene is known to have polymorphic sequence variation within the population.

### III. Modified RNAi Agents of the Disclosure

[0478] In one embodiment, the RNA of the RNAi agent of the disclosure e.g., a dsRNA, is un-modified, and does not comprise, e.g., chemical modifications or conjugations known in the art and described herein. In preferred embodiments, the RNA of an RNAi agent of the disclosure, e.g., a dsRNA, is chemically modified to enhance stability or other beneficial characteristics. In certain embodiments of the disclosure, substantially all of the nucleotides of an RNAi agent of the disclosure are modified. In other embodiments of the disclosure, all of the nucleotides of an RNAi agent of the disclosure are modified. RNAi agents of the disclosure in which “substantially all of the nucleotides are modified” are largely but not wholly modified and can include not more than 5, 4, 3, 2, or 1 unmodified nucleotides. In still other embodiments of the disclosure, RNAi agents of the disclosure can include not more than 5, 4, 3, 2 or 1 modified nucleotides.

[0479] The nucleic acids featured in the disclosure can be synthesized or modified by methods well established in the art, such as those described in “Current protocols in nucleic acid chemistry,” Beaucage, S. L. et al. (Edrs.), John Wiley & Sons, Inc., New York, NY, USA, which is hereby incorporated herein by reference. Modifications include, for example, end modifications, e.g., 5′-end modifications (phosphorylation, conjugation, inverted linkages) or 3′-end modifications (conjugation, DNA nucleotides, inverted linkages, etc.); base modifications, e.g., replacement with stabilizing bases, destabilizing bases, or bases that base pair with an expanded repertoire of partners, removal of bases (abasic nucleotides), or conjugated bases; sugar modifications (e.g., at the 2′-position or 4′-position) or replacement of the sugar; or backbone modifications, including modification or replacement of the phosphodiester linkages. Specific examples of RNAi agents useful in the embodiments described herein include, but are not limited to, RNAs containing modified backbones or no natural internucleoside linkages. RNAs having modified backbones include, among others, those that do not have a phosphorus atom in the backbone. For the purposes of this specification, and as sometimes referenced in the art, modified RNAs that do not have a phosphorus atom in their internucleoside backbone can also be considered to be oligonucleosides. In some embodiments, a modified RNAi agent will have a phosphorus atom in its internucleoside backbone.

[0480] Modified RNA backbones include, for example, phosphorothioates, chiral phosphorothioates, phosphorodithioates, phosphotriesters, aminoalkylphosphotriesters, methyl and other alkyl phosphonates including 3′-alkylene phosphonates and chiral phosphonates, phosphinates, phosphoramidates including 3′-amino phosphoramidate and aminoalkylphosphoramidates, thionophosphoramidates, thionoalkylphosphonates, thionoalkylphosphotriesters, and boranophosphates having normal 3′-5′ linkages, 2′-5′-linked analogs of these, and those having inverted polarity wherein the adjacent pairs of nucleoside units are linked 3′-5′ to 5′-3′ or 2′-5′ to 5′-2′. Various salts, e.g., sodium salts, mixed salts and free acid forms are also included.

[0481] Representative U.S. patents that teach the preparation of the above phosphorus-containing linkages include, but are not limited to, U.S. Pat. Nos. 3,687,808; 4,469,863; 4,476,301; 5,023,243; 5,177,195; 5,188,897; 5,264,423; 5,276,019; 5,278,302; 5,286,717; 5,321,131; 5,399,676; 5,405,939; 5,453,496; 5,455,233; 5,466,677; 5,476,925; 5,519,126; 5,536,821; 5,541,316; 5,550,111; 5,563,253; 5,571,799; 5,587,361; 5,625,050; 6,028,188; 6,124,445; 6,160,109; 6,169,170; 6,172,209; 6,239,265; 6,277,603; 6,326,199; 6,346,614; 6,444,423; 6,531,590; 6,534,639; 6,608,035; 6,683,167; 6,858,715; 6,867,294; 6,878,805; 7,015,315; 7,041,816; 7,273,933; 7,321,029; and U.S. Pat. RE39464, the entire contents of each of which are hereby incorporated herein by reference.

[0482] Modified RNA backbones that do not include a phosphorus atom therein have backbones that are formed by short chain alkyl or cycloalkyl internucleoside linkages, mixed heteroatoms and alkyl or cycloalkyl internucleoside linkages, or one or more short chain heteroatomic or heterocyclic internucleoside linkages. These include those having morpholino linkages (formed in part from the sugar portion of a nucleoside); siloxane backbones; sulfide, sulfoxide and sulfone backbones; formacetyl and thioformacetyl backbones; methylene formacetyl and thioformacetyl backbones; alkene containing backbones; sulfamate backbones; methyleneimino and methylenehydrazino backbones; sulfonate and sulfonamide backbones; amide backbones; and others having mixed N, O, S and CH₂ component parts.

[0483] Representative U.S. patents that teach the preparation of the above oligonucleosides include, but are not limited to, U.S. Pat. Nos. 5,034,506; 5,166,315; 5,185,444; 5,214,134; 5,216,141; 5,235,033; 5,64,562; 5,264,564; 5,405,938; 5,434,257; 5,466,677; 5,470,967; 5,489,677; 5,541,307; 5,561,225; 5,596,086; 5,602,240; 5,608,046; 5,610,289; 5,618,704; 5,623,070; 5,663,312; 5,633,360; 5,677,437; and, 5,677,439, the entire contents of each of which are hereby incorporated herein by reference.

[0484] In other embodiments, suitable RNA mimetics are contemplated for use in RNAi agents, in which both the sugar and the internucleoside linkage, i.e., the backbone, of the nucleotide units are replaced with novel groups. The base units are maintained for hybridization with an appropriate nucleic acid target compound. One such oligomeric compound, an RNA mimetic that has been shown to have excellent hybridization properties, is referred to as a peptide nucleic acid (PNA). In PNA compounds, the sugar backbone of an RNA is replaced with an amide containing backbone, in particular an aminoethylglycine backbone. The nucleobases are retained and are bound directly or indirectly to aza nitrogen atoms of the amide portion of the backbone. Representative U.S. patents that teach the preparation of PNA compounds include, but are not limited to, U.S. Pat. Nos. 5,539,082; 5,714,331; and 5,719,262, the entire contents of each of which are hereby incorporated herein by reference. Additional PNA compounds suitable for use in the RNAi agents of the disclosure are described in, for example, in Nielsen et al., Science, 1991, 254, 1497-1500.

[0485] Some embodiments featured in the disclosure include RNAs with phosphorothioate backbones and oligonucleosides with heteroatom backbones, and in particular —CH₂—NH—CH₂—, —CH₂—N(CH₃)—O—CH₂— [known as a methylene (methylimino) or MMI backbone], —CH₂—O—N(CH₃)—CH₂—, —CH₂—N(CH₃)—N(CH₃)—CH₂— and —N(CH₃)—CH₂—CH₂— of the above-referenced U.S. Pat. No. 5,489,677, and the amide backbones of the above-referenced U.S. Pat. No. 5,602,240. In some embodiments, the RNAs featured herein have morpholino backbone structures of the above-referenced U.S. Pat. No. 5,034,506. The native phosphodiester backbone can be represented as O—P(O)(OH)—OCH2-.

[0486] Modified RNAs can also contain one or more substituted sugar moieties. The RNAi agents, e.g., dsRNAs, featured herein can include one of the following at the 2′-position: OH; F; O-, S-, or N-alkyl; O-, S-, or N-alkenyl; O-, S- or N-alkynyl; or O-alkyl-O-alkyl, wherein the alkyl, alkenyl and alkynyl can be substituted or unsubstituted C₁ to C₁₀ alkyl or C₂ to C₁₀ alkenyl and alkynyl. Exemplary suitable modifications include O[(CH₂)ₙO]ₘCH₃, O(CH₂)·ₙOCH₃, O(CH₂)ₙNH₂, O(CH₂)ₙCH₃, O(CH₂)ₙONH₂, and O(CH₂)ₙON[(CH₂)ₙCH₃)]₂, where n and m are from 1 to about 10. In other embodiments, dsRNAs include one of the following at the 2′ position: C₁ to C₁₀ lower alkyl, substituted lower alkyl, alkaryl, aralkyl, O-alkaryl or O-aralkyl, SH, SCH₃, OCN, Cl, Br, CN, CF₃, OCF₃, SOCH₃, SO₂CH₃, ONO₂, NO₂, N₃, NH₂, heterocycloalkyl, heterocycloalkaryl, aminoalkylamino, polyalkylamino, substituted silyl, an RNA cleaving group, a reporter group, an intercalator, a group for improving the pharmacokinetic properties of a RNAi agent, or a group for improving the pharmacodynamic properties of a RNAi agent, and other substituents having similar properties. In some embodiments, the modification includes a 2′-methoxyethoxy (2′-O—CH₂CH₂OCH₃, also known as 2′-O-(2-methoxyethyl) or 2′-MOE) (Martin et al., Helv. Chim. Acta, 1995, 78:486-504) i.e., an alkoxy-alkoxy group. Another exemplary modification is 2′-dimethylaminooxyethoxy, i.e., a O(CH₂)₂ON(CH₃)₂ group, also known as 2′-DMAOE, as described in examples herein below, and 2′-dimethylaminoethoxyethoxy (also known in the art as 2′-O-dimethylaminoethoxyethyl or 2′-DMAEOE), i.e., 2′-O—CH₂—O—CH₂—N(CH₂)₂. Further exemplary modifications include: 5′-Me-2′-F nucleotides, 5′-Me-2′-OMe nucleotides, 5′-Me-2′-deoxynucleotides, (both R and S isomers in these three families); 2′-alkoxyalkyl; and 2′-NMA (N-methylacetamide).

[0487] Other modifications include 2′-methoxy (2′-OCH₃), 2′-aminopropoxy (2′-OCH₂CH₂CH₂NH₂), 2′-O-hexadecyl, and 2′-fluoro (2′-F). Similar modifications can also be made at other positions on the RNA of a RNAi agent, particularly the 3′ position of the sugar on the 3′ terminal nucleotide or in 2′-5′ linked dsRNAs and the 5′ position of 5′ terminal nucleotide. RNAi agents can also have sugar mimetics such as cyclobutyl moieties in place of the pentofuranosyl sugar. Representative U.S. patents that teach the preparation of such modified sugar structures include, but are not limited to, U.S. Pat. Nos. 4,981,957; 5,118,800; 5,319,080; 5,359,044; 5,393,878; 5,446,137; 5,466,786; 5,514,785; 5,519,134; 5,567,811; 5,576,427; 5,591,722; 5,597,909; 5,610,300; 5,627,053; 5,639,873; 5,646,265; 5,658,873; 5,670,633; and 5,700,920, certain of which are commonly owned with the instant application. The entire contents of each of the foregoing are hereby incorporated herein by reference.

[0488] An RNAi agent of the disclosure can also include nucleobase (often referred to in the art simply as “base”) modifications or substitutions. As used herein, “unmodified” or “natural” nucleobases include the purine bases adenine (A) and guanine (G), and the pyrimidine bases thymine (T), cytosine (C) and uracil (U). Modified nucleobases include other synthetic and natural nucleobases such as 5-methylcytosine (5-me-C), 5-hydroxymethyl cytosine, xanthine, hypoxanthine, 2-aminoadenine, 6-methyl and other alkyl derivatives of adenine and guanine, 2-propyl and other alkyl derivatives of adenine and guanine, 2-thiouracil, 2-thiothymine and 2-thiocytosine, 5-halouracil and cytosine, 5-propynyl uracil and cytosine, 6-azo uracil, cytosine and thymine, 5-uracil (pseudouracil), 4-thiouracil, 8-halo, 8-amino, 8-thiol, 8-thioalkyl, 8-hydroxyl anal other 8-substituted adenines and guanines, 5-halo, particularly 5-bromo, 5-trifluoromethyl and other 5-substituted uracils and cytosines, 7-methylguanine and 7-methyladenine, 8-azaguanine and 8-azaadenine, 7-deazaguanine and 7-daazaadenine and 3-deazaguanine and 3-deazaadenine. Further nucleobases include those disclosed in U.S. Pat. No. 3,687,808, those disclosed in Modified Nucleosides in Biochemistry, Biotechnology and Medicine, Herdewijn, P. ed. Wiley-VCH, 2008; those disclosed in The Concise Encyclopedia Of Polymer Science And Engineering, pages 858-859, Kroschwitz, J. L, ed. John Wiley & Sons, 1990, these disclosed by Englisch et al., (1991) Angewandte Chemie, International Edition, 30:613, and those disclosed by Sanghvi, Y S., Chapter 15, dsRNA Research and Applications, pages 289-302, Crooke, S. T. and Lebleu, B., Ed., CRC Press, 1993. Certain of these nucleobases are particularly useful for increasing the binding affinity of the oligomeric compounds featured in the disclosure. These include 5-substituted pyrimidines, 6-azapyrimidines and N-2, N-6 and 0-6 substituted purines, including 2-aminopropyladenine, 5-propynyluracil and 5-propynylcytosine. 5-methylcytosine substitutions have been shown to increase nucleic acid duplex stability by 0.6-1.2° C. (Sanghvi, Y. S., Crooke, S. T. and Lebleu, B., Eds., dsRNA Research and Applications, CRC Press, Boca Raton, 1993, pp. 276-278) and are exemplary base substitutions, even more particularly when combined with 2′-O-methoxyethyl sugar modifications.

[0489] Representative U.S. patents that teach the preparation of certain of the above noted modified nucleobases as well as other modified nucleobases include, but are not limited to, the above noted U.S. Pat. Nos. 3,687,808, 4,845,205; 5,130,30; 5,134,066; 5,175,273; 5,367,066; 5,432,272; 5,457,187; 5,459,255; 5,484,908; 5,502,177; 5,525,711; 5,552,540; 5,587,469; 5,594,121, 5,596,091; 5,614,617; 5,681,941; 5,750,692; 6,015,886; 6,147,200; 6,166,197; 6,222,025; 6,235,887; 6,380,368; 6,528,640; 6,639,062; 6,617,438; 7,045,610; 7,427,672; and 7,495,088, the entire contents of each of which are hereby incorporated herein by reference.

[0490] An RNAi agent of the disclosure can also be modified to include one or more bicyclic sugar moities. A “bicyclic sugar” is a furanosyl ring modified by a ring formed by the bridging of two carbons, whether adjacent or non-adjacent. A “bicyclic nucleoside” (“BNA”) is a nucleoside having a sugar moiety comprising a ring formed by bridging two carbons, whether adjacent or non-adjacent, of the sugar ring, thereby forming a bicyclic ring system. In certain embodiments, the bridge connects the 4′-carbon and the 2′-carbon of the sugar ring, optionally, via the 2′-acyclic oxygen atom. Thus, in some embodiments an agent of the disclosure may include one or more locked nucleic acids (LNA). A locked nucleic acid is a nucleotide having a modified ribose moiety in which the ribose moiety comprises an extra bridge connecting the 2′ and 4′ carbons. In other words, an LNA is a nucleotide comprising a bicyclic sugar moiety comprising a 4′-CH2-O-2′ bridge. This structure effectively “locks” the ribose in the 3′-endo structural conformation. The addition of locked nucleic acids to siRNAs has been shown to increase siRNA stability in serum, and to reduce off-target effects (Elmen, J. et al., (2005) Nucleic Acids Research 33(1):439-447; Mook, O R. et al., (2007) Mol Canc Ther 6(3):833-843; Grunweller, A. et al., (2003) Nucleic Acids Research 31(12):3185-3193). Examples of bicyclic nucleosides for use in the polynucleotides of the disclosure include without limitation nucleosides comprising a bridge between the 4′ and the 2′ ribosyl ring atoms. In certain embodiments, the antisense polynucleotide agents of the disclosure include one or more bicyclic nucleosides comprising a 4′ to 2′ bridge.

[0491] A locked nucleoside can be represented by the structure (omitting stereochemistry),

[chemical structure]

[0492] wherein B is a nucleobase or modified nucleobase and L is the linking group that joins the 2′-carbon to the 4′-carbon of the ribose ring. Examples of such 4′ to 2′ bridged bicyclic nucleosides, include but are not limited to 4′-(CH₂)—O-2′ (LNA); 4′-(CH₂)—S-2′; 4′-(CH₂)2-O-2′ (ENA); 4′-CH(CH₃)—O-2′ (also referred to as “constrained ethyl” or “cEt”) and 4′-CH(CH₂OCH₃)—O-2′ (and analogs thereof; see, e.g., U.S. Pat. No. 7,399,845); 4′-C(CH₃)(CH₃)—O-2′ (and analogs thereof; see e.g., U.S. Pat. No. 8,278,283); 4′-CH₂—N(OCH₃)-2′ (and analogs thereof; see e.g., U.S. Pat. No. 8,278,425); 4′-CH₂—O—N(CH₃)-2′ (see, e.g., U.S. Patent Publication No. 2004/0171570); 4′-CH2-N(R)—O-2′, wherein R is H, C1-C12 alkyl, or a nitrogen protecting group (see, e.g., U.S. Pat. No. 7,427,672; Greene's Protective Groups in Organic Synthesis, Fourth Edition, 2006, eds. John Wiley & Sons, Inc.); 4′-CH₂—C(H)(CH₃)-2′ (see, e.g., Chattopadhyaya et al., J. Org. Chem., 2009, 74, 118-134); and 4′-CH₂—C(═CH₂)-2′ (and analogs thereof; see, e.g., U.S. Pat. No. 8,278,426). The entire contents of each of the foregoing are hereby incorporated herein by reference.

[0493] Additional representative US patents and US patenttent Publications that teach the preparation of locked nucleic acid nucleotides include, but are not limited to, the following: U.S. Pat. Nos. 6,268,490; 6,525,191; 6,670,461; 6,770,748; 6,794,499; 6,998,484; 7,053,207; 7,034,133; 7,084,125; 7,399,845; 7,427,672; 7,569,686; 7,741,457; 8,022,193; 8,030,467; 8,278,425; 8,278,426; 8,278,283; US 2008/0039618; and US 2009/0012281, the entire contents of each of which are hereby incorporated herein by reference.

[0494] Any of the foregoing bicyclic nucleosides can be prepared having one or more stereochemical sugar configurations including for example α-L-ribofuranose and β-D-ribofuranose (see WO 99/14226).

[0495] An RNAi agent of the disclosure can also be modified to include one or more constrained ethyl nucleotides. As used herein, a “constrained ethyl nucleotide” or “cEt” is a locked nucleic acid comprising a bicyclic sugar moiety comprising a 4′-CH(CH₃)—O-2′ bridge (i.e., L in the preceding structure). In one embodiment, a constrained ethyl nucleotide is in the S conformation referred to herein as “S-cEt.”

[0496] An RNAi agent of the disclosure may also include one or more “conformationally restricted nucleotides” (“CRN”). CRN are nucleotide analogs with a linker connecting the C2′ and C4′ carbons of ribose or the C3 and —C5′ carbons of ribose. CRN lock the ribose ring into a stable conformation and increase the hybridization affinity to mRNA. The linker is of sufficient length to place the oxygen in an optimal position for stability and affinity resulting in less ribose ring puckering.

[0497] Representative publications that teach the preparation of certain of the above noted CRN include, but are not limited to, US 2013/0190383; and WO 2013/036868, the entire contents of each of which are hereby incorporated herein by reference.

[0498] In some embodiments, a RNAi agent of the disclosure comprises one or more monomers that are UNA (unlocked nucleic acid) nucleotides. UNA is unlocked acyclic nucleic acid, wherein any of the bonds of the sugar has been removed, forming an unlocked “sugar” residue. In one example, UNA also encompasses monomer with bonds between C1′-C4′ have been removed (i.e. the covalent carbon-oxygen-carbon bond between the C1′ and C4′ carbons). In another example, the C2′-C3′ bond (i.e. the covalent carbon-carbon bond between the C2′ and C3′ carbons) of the sugar has been removed (see Nuc. Acids Symp. Series, 52, 133-134 (2008) and Fluiter et al., Mol. Biosyst., 2009, 10, 1039 hereby incorporated by reference).

[0499] Representative U.S. publications that teach the preparation of UNA include, but are not limited to, U.S. Pat. No. 8,314,227; and US Patent Publication Nos. 2013/0096289; 2013/0011922; and 2011/0313020, the entire contents of each of which are hereby incorporated herein by reference.

[0500] Potentially stabilizing modifications to the ends of RNA molecules can include N-(acetylaminocaproyl)-4-hydroxyprolinol (Hyp-C6-NHAc), N-(caproyl-4-hydroxyprolinol (Hyp-C6), N-(acetyl-4-hydroxyprolinol (Hyp-NHAc), thymidine-2′-O-deoxythymidine (ether), N-(aminocaproyl)-4-hydroxyprolinol (Hyp-C6-amino), 2-docosanoyl-uridine-3′-phosphate, inverted 2′-deoxy-modified ribonucleotide, such as inverted dT(idT), inverted dA (idA), and inverted abasic 2′-deoxyribonucleotide (iAb) and others. Disclosure of this modification can be found in WO 2011/005861.

[0501] In one example, the 3′ or 5′ terminal end of a oligonucleotide is linked to an inverted 2′-deoxy-modified ribonucleotide, such as inverted dT(idT), inverted dA (idA), or a inverted abasic 2′-deoxyribonucleotide (iAb). In one particular example, the inverted 2′-deoxy-modified ribonucleotide is linked to the 3′end of an oligonucleotide, such as the 3′-end of a sense strand described herein, where the linking is via a 3′-3′ phosphodiester linkage or a 3′-3′-phosphorothioate linkage.

[0502] In another example, the 3′-end of a sense strand is linked via a 3′-3′-phosphorothioate linkage to an inverted abasic ribonucleotide (iAb). In another example, the 3′-end of a sense strand is linked via a 3′-3′-phosphorothioate linkage to an inverted dA (idA).

[0503] In one particular example, the inverted 2′-deoxy-modified ribonucleotide is linked to the 3′end of an oligonucleotide, such as the 3′-end of a sense strand described herein, where the linking is via a 3′-3′ phosphodiester linkage or a 3′-3′-phosphorothioate linkage.

[0504] In another example, the 3′-terminal nucleotides of a sense strand is an inverted dA (idA) and is linked to the preceding nucleotide via a 3′-3′-linkage (e.g., 3′-3′-phosphorothioate linkage).

[0505] Other modifications of a RNAi agent of the disclosure include a 5′ phosphate or 5′ phosphate mimic, e.g., a 5′-terminal phosphate or phosphate mimic on the antisense strand of a RNAi agent. Suitable phosphate mimics are disclosed in, for example US 2012/0157511, the entire contents of which are incorporated herein by reference.

### A. Modified RNAi Agents Comprising Motifs of the Disclosure

[0506] In certain aspects of the disclosure, the double-stranded RNAi agents of the disclosure include agents with chemical modifications as disclosed, for example, in WO 2013/075035, the entire contents of which are incorporated herein by reference. As shown herein and in WO 2013/075035, a superior result may be obtained by introducing one or more motifs of three identical modifications on three consecutive nucleotides into a sense strand or antisense strand of an RNAi agent, particularly at or near the cleavage site. In some embodiments, the sense strand and antisense strand of the RNAi agent may otherwise be completely modified. The introduction of these motifs interrupts the modification pattern, if present, of the sense or antisense strand. The RNAi agent may be optionally conjugated with a lipophilic ligand, e.g., a C16 ligand, for instance on the sense strand. The RNAi agent may be optionally modified with a (S)-glycol nucleic acid (GNA) modification, for instance on one or more residues of the antisense strand.

[0507] Accordingly, the disclosure provides double stranded RNAi agents capable of inhibiting the expression of a target gene (i.e., a SOD1 gene) in vivo. The RNAi agent comprises a sense strand and an antisense strand. Each strand of the RNAi agent may be 15-30 nucleotides in length. For example, each strand may be 16-30 nucleotides in length, 17-30 nucleotides in length, 25-30 nucleotides in length, 27-30 nucleotides in length, 17-23 nucleotides in length, 17-21 nucleotides in length, 17-19 nucleotides in length, 19-25 nucleotides in length, 19-23 nucleotides in length, 19-21 nucleotides in length, 21-25 nucleotides in length, or 21-23 nucleotides in length. In certain embodiments, each strand is 19-23 nucleotides in length.

[0508] The sense strand and antisense strand typically form a duplex double stranded RNA (“dsRNA”), also referred to herein as an “RNAi agent.” The duplex region of an RNAi agent may be 15-30 nucleotide pairs in length. For example, the duplex region can be 16-30 nucleotide pairs in length, 17-30 nucleotide pairs in length, 27-30 nucleotide pairs in length, 17-23 nucleotide pairs in length, 17-21 nucleotide pairs in length, 17-19 nucleotide pairs in length, 19-25 nucleotide pairs in length, 19-23 nucleotide pairs in length, 19-21 nucleotide pairs in length, 21-25 nucleotide pairs in length, or 21-23 nucleotide pairs in length. In another example, the duplex region is selected from 15, 16, 17, 18, 19, 20, 21, 22, 23, 24, 25, 26, and 27 nucleotides in length. In preferred embodiments, the duplex region is 19-21 nucleotide pairs in length.

[0509] In one embodiment, the RNAi agent may contain one or more overhang regions or capping groups at the 3′-end, 5′-end, or both ends of one or both strands. The overhang can be 1-6 nucleotides in length, for instance 2-6 nucleotides in length, 1-5 nucleotides in length, 2-5 nucleotides in length, 1-4 nucleotides in length, 2-4 nucleotides in length, 1-3 nucleotides in length, 2-3 nucleotides in length, or 1-2 nucleotides in length. In preferred embodiments, the nucleotide overhang region is 2 nucleotides in length. The overhangs can be the result of one strand being longer than the other, or the result of two strands of the same length being staggered. The overhang can form a mismatch with the target mRNA or it can be complementary to the gene sequences being targeted or can be another sequence. The first and second strands can also be joined, e.g., by additional bases to form a hairpin, or by other non-base linkers.

[0510] In one embodiment, the nucleotides in the overhang region of the RNAi agent can each independently be a modified or unmodified nucleotide including, but no limited to 2′-sugar modified, such as, 2-F, 2′-O-methyl, thymidine (T), and any combinations thereof.

[0511] For example, TT can be an overhang sequence for either end on either strand. The overhang can form a mismatch with the target mRNA or it can be complementary to the gene sequences being targeted or can be another sequence.

[0512] The 5′- or 3′-overhangs at the sense strand, antisense strand or both strands of the RNAi agent may be phosphorylated. In some embodiments, the overhang region(s) contains two nucleotides having a phosphorothioate between the two nucleotides, where the two nucleotides can be the same or different. In one embodiment, the overhang is present at the 3′-end of the sense strand, antisense strand, or both strands. In one embodiment, this 3′-overhang is present in the antisense strand. In one embodiment, this 3′-overhang is present in the sense strand.

[0513] The RNAi agent may contain only a single overhang, which can strengthen the interference activity of the RNAi, without affecting its overall stability. For example, the single-stranded overhang may be located at the 3-terminal end of the sense strand or, alternatively, at the 3-terminal end of the antisense strand. The RNAi may also have a blunt end, located at the 5′-end of the antisense strand (or the 3′-end of the sense strand) or vice versa. Generally, the antisense strand of the RNAi has a nucleotide overhang at the 3′-end, and the 5′-end is blunt. While not wishing to be bound by theory, the asymmetric blunt end at the 5′-end of the antisense strand and 3′-end overhang of the antisense strand favor the guide strand loading into RISC process.

[0514] In one embodiment, the RNAi agent is a double blunt-ended of 19 nucleotides in length, wherein the sense strand contains at least one motif of three 2′-F modifications on three consecutive nucleotides at positions 7, 8, 9 from the 5′end. The antisense strand contains at least one motif of three 2′-O-methyl modifications on three consecutive nucleotides at positions 11, 12, 13 from the 5′end.

[0515] In another embodiment, the RNAi agent is a double blunt-ended of 20 nucleotides in length, wherein the sense strand contains at least one motif of three 2′-F modifications on three consecutive nucleotides at positions 8, 9, 10 from the 5′end. The antisense strand contains at least one motif of three 2′-O-methyl modifications on three consecutive nucleotides at positions 11, 12, 13 from the 5′end.

[0516] In yet another embodiment, the RNAi agent is a double blunt-ended of 21 nucleotides in length, wherein the sense strand contains at least one motif of three 2′-F modifications on three consecutive nucleotides at positions 9, 10, 11 from the 5′end. The antisense strand contains at least one motif of three 2′-O-methyl modifications on three consecutive nucleotides at positions 11, 12, 13 from the 5′end.

[0517] In one embodiment, the RNAi agent comprises a 21 nucleotide sense strand and a 23 nucleotide antisense strand, wherein the sense strand contains at least one motif of three 2′-F modifications on three consecutive nucleotides at positions 9, 10, 11 from the 5′end; the antisense strand contains at least one motif of three 2′-O-methyl modifications on three consecutive nucleotides at positions 11, 12, 13 from the 5′end, wherein one end of the RNAi agent is blunt, while the other end comprises a 2 nucleotide overhang. Preferably, the 2 nucleotide overhang is at the 3′-end of the antisense strand. When the 2 nucleotide overhang is at the 3′-end of the antisense strand, there may be two phosphorothioate internucleotide linkages between the terminal three nucleotides, wherein two of the three nucleotides are the overhang nucleotides, and the third nucleotide is a paired nucleotide next to the overhang nucleotide. In one embodiment, the RNAi agent additionally has two phosphorothioate internucleotide linkages between the terminal three nucleotides at both the 5′-end of the sense strand and at the 5′-end of the antisense strand. In one embodiment, every nucleotide in the sense strand and the antisense strand of the RNAi agent, including the nucleotides that are part of the motifs are modified nucleotides. In one embodiment each residue is independently modified with a 2′-O-methyl or 2′-fluoro, e.g., in an alternating motif. Optionally, the RNAi agent further comprises a ligand (e.g., a lipophilic ligand, optionally a C16 ligand).

[0518] In one embodiment, the RNAi agent comprises a sense and an antisense strand, wherein the sense strand is 25-30 nucleotide residues in length, wherein starting from the 5′ terminal nucleotide (position 1) positions 1 to 23 of the first strand comprise at least 8 ribonucleotides; the antisense strand is 36-66 nucleotide residues in length and, starting from the 3′ terminal nucleotide, comprises at least 8 ribonucleotides in the positions paired with positions 1-23 of sense strand to form a duplex; wherein at least the 3′ terminal nucleotide of antisense strand is unpaired with sense strand, and up to 6 consecutive 3′ terminal nucleotides are unpaired with sense strand, thereby forming a 3′ single stranded overhang of 1-6 nucleotides; wherein the 5′ terminus of antisense strand comprises from 10-30 consecutive nucleotides which are unpaired with sense strand, thereby forming a 10-30 nucleotide single stranded 5′ overhang; wherein at least the sense strand 5′ terminal and 3′ terminal nucleotides are base paired with nucleotides of antisense strand when sense and antisense strands are aligned for maximum complementarity, thereby forming a substantially duplexed region between sense and antisense strands; and antisense strand is sufficiently complementary to a target RNA along at least 19 ribonucleotides of antisense strand length to reduce target gene expression when the double stranded nucleic acid is introduced into a mammalian cell; and wherein the sense strand contains at least one motif of three 2′-F modifications on three consecutive nucleotides, where at least one of the motifs occurs at or near the cleavage site. The antisense strand contains at least one motif of three 2′-O-methyl modifications on three consecutive nucleotides at or near the cleavage site.

[0519] In one embodiment, the RNAi agent comprises sense and antisense strands, wherein the RNAi agent comprises a first strand having a length which is at least 25 and at most 29 nucleotides and a second strand having a length which is at most 30 nucleotides with at least one motif of three 2′-O-methyl modifications on three consecutive nucleotides at position 11, 12, 13 from the 5′ end; wherein the 3′ end of the first strand and the 5′ end of the second strand form a blunt end and the second strand is 1-4 nucleotides longer at its 3′ end than the first strand, wherein the duplex region region which is at least 25 nucleotides in length, and the second strand is sufficiently complementary to a target mRNA along at least 19 nucleotide of the second strand length to reduce target gene expression when the RNAi agent is introduced into a mammalian cell, and wherein dicer cleavage of the RNAi agent preferentially results in an siRNA comprising the 3′ end of the second strand, thereby reducing expression of the target gene in the mammal. Optionally, the RNAi agent further comprises a ligand.

[0520] In one embodiment, the sense strand of the RNAi agent contains at least one motif of three identical modifications on three consecutive nucleotides, where one of the motifs occurs at the cleavage site in the sense strand.

[0521] In one embodiment, the antisense strand of the RNAi agent can also contain at least one motif of three identical modifications on three consecutive nucleotides, where one of the motifs occurs at or near the cleavage site in the antisense strand.

[0522] For an RNAi agent having a duplex region of 17-23 nucleotide in length, the cleavage site of the antisense strand is typically around the 10, 11 and 12 positions from the 5′-end. Thus the motifs of three identical modifications may occur at the 9, 10, 11 positions; 10, 11, 12 positions; 11, 12, 13 positions; 12, 13, 14 positions; or 13, 14, 15 positions of the antisense strand, the count starting from the 1^{st} nucleotide from the 5′-end of the antisense strand, or, the count starting from the 1′ paired nucleotide within the duplex region from the 5′-end of the antisense strand. The cleavage site in the antisense strand may also change according to the length of the duplex region of the RNAi from the 5′-end.

[0523] The sense strand of the RNAi agent may contain at least one motif of three identical modifications on three consecutive nucleotides at the cleavage site of the strand; and the antisense strand may have at least one motif of three identical modifications on three consecutive nucleotides at or near the cleavage site of the strand. When the sense strand and the antisense strand form a dsRNA duplex, the sense strand and the antisense strand can be so aligned that one motif of the three nucleotides on the sense strand and one motif of the three nucleotides on the antisense strand have at least one nucleotide overlap, i.e., at least one of the three nucleotides of the motif in the sense strand forms a base pair with at least one of the three nucleotides of the motif in the antisense strand. Alternatively, at least two nucleotides may overlap, or all three nucleotides may overlap.

[0524] In one embodiment, the sense strand of the RNAi agent may contain more than one motif of three identical modifications on three consecutive nucleotides. The first motif may occur at or near the cleavage site of the strand and the other motifs may be a wing modification. The term “wing modification” herein refers to a motif occurring at another portion of the strand that is separated from the motif at or near the cleavage site of the same strand. The wing modification is either adjacent to the first motif or is separated by at least one or more nucleotides. When the motifs are immediately adjacent to each other then the chemistry of the motifs are distinct from each other and when the motifs are separated by one or more nucleotide than the chemistries can be the same or different. Two or more wing modifications may be present. For instance, when two wing modifications are present, each wing modification may occur at one end relative to the first motif which is at or near cleavage site or on either side of the lead motif.

[0525] Like the sense strand, the antisense strand of the RNAi agent may contain more than one motif of three identical modifications on three consecutive nucleotides, with at least one of the motifs occurring at or near the cleavage site of the strand. This antisense strand may also contain one or more wing modifications in an alignment similar to the wing modifications that may be present on the sense strand.

[0526] In one embodiment, the wing modification on the sense strand or antisense strand of the RNAi agent typically does not include the first one or two terminal nucleotides at the 3′-end, 5′-end or both ends of the strand.

[0527] In another embodiment, the wing modification on the sense strand or antisense strand of the RNAi agent typically does not include the first one or two paired nucleotides within the duplex region at the 3′-end, 5′-end or both ends of the strand.

[0528] When the sense strand and the antisense strand of the RNAi agent each contain at least one wing modification, the wing modifications may fall on the same end of the duplex region, and have an overlap of one, two or three nucleotides.

[0529] When the sense strand and the antisense strand of the RNAi agent each contain at least two wing modifications, the sense strand and the antisense strand can be so aligned that two modifications each from one strand fall on one end of the duplex region, having an overlap of one, two or three nucleotides; two modifications each from one strand fall on the other end of the duplex region, having an overlap of one, two or three nucleotides; two modifications one strand fall on each side of the lead motif, having an overlap of one, two, or three nucleotides in the duplex region.

[0530] In one embodiment, the RNAi agent comprises mismatch(es) with the target, within the duplex, or combinations thereof. The mistmatch may occur in the overhang region or the duplex region. The base pair may be ranked on the basis of their propensity to promote dissociation or melting (e.g., on the free energy of association or dissociation of a particular pairing, the simplest approach is to examine the pairs on an individual pair basis, though next neighbor or similar analysis can also be used). In terms of promoting dissociation: A:U is preferred over G:C; G:U is preferred over G:C; and I:C is preferred over G:C (I=inosine). Mismatches, e.g., non-canonical or other than canonical pairings (as described elsewhere herein) are preferred over canonical (A:T, A:U, G:C) pairings; and pairings which include a universal base are preferred over canonical pairings.

[0531] In one embodiment, the RNAi agent comprises at least one of the first 1, 2, 3, 4, or 5 base pairs within the duplex regions from the 5′-end of the antisense strand independently selected from the group of: A:U, G:U, I:C, and mismatched pairs, e.g., non-canonical or other than canonical pairings or pairings which include a universal base, to promote the dissociation of the antisense strand at the 5′-end of the duplex.

[0532] In one embodiment, the nucleotide at the 1 position within the duplex region from the 5′-end in the antisense strand is selected from the group consisting of A, dA, dU, U, and dT. Alternatively, at least one of the first 1, 2 or 3 base pair within the duplex region from the 5′-end of the antisense strand is an AU base pair. For example, the first base pair within the duplex region from the 5′-end of the antisense strand is an AU base pair.

[0533] In another embodiment, the nucleotide at the 3′-end of the sense strand is deoxythimidine (dT). In another embodiment, the nucleotide at the 3′-end of the antisense strand is deoxythimidine (dT). In one embodiment, there is a short sequence of deoxythimidine nucleotides, for example, two dT nucleotides on the 3′-end of the sense or antisense strand.

[0534] In one embodiment, the sense strand sequence may be represented by formula (I):

5′nₚ-Nₐ-(XXX)ᵢ-N_{b}-YYY-N_{b}-(ZZZ)ⱼ-Nₐ-n_{q}3′ (I)
[0535] wherein:
[0536] i and j are each independently 0 or 1;
[0537] p and q are each independently 0-6;
[0538] each Nₐ independently represents an oligonucleotide sequence comprising 0-25 modified nucleotides, each sequence comprising at least two differently modified nucleotides;
[0539] each N_{b} independently represents an oligonucleotide sequence comprising 0-10 modified nucleotides;
[0540] each nₚ and n_{q} independently represent an overhang nucleotide;
[0541] wherein Nb and Y do not have the same modification; and
[0542] XXX, YYY and ZZZ each independently represent one motif of three identical modifications on three consecutive nucleotides. Preferably YYY is all 2′-F modified nucleotides.

[0543] In one embodiment, the Nₐ or N_{b} comprise modifications of alternating pattern.

[0544] In one embodiment, the YYY motif occurs at or near the cleavage site of the sense strand. For example, when the RNAi agent has a duplex region of 17-23 nucleotides in length, the YYY motif can occur at or the vicinity of the cleavage site (e.g.: can occur at positions 6, 7, 8, 7, 8, 9, 8, 9, 10, 9, 10, 11, 10, 11, 12 or 11, 12, 13) of—the sense strand, the count starting from the 1^{st} nucleotide, from the 5′-end; or optionally, the count starting at the 1′ paired nucleotide within the duplex region, from the 5′-end.

[0545] In one embodiment, i is 1 and j is 0, or i is 0 and j is 1, or both i and j are 1. The sense strand can therefore be represented by the following formulas:

5′nₚ-Nₐ-YYY-N_{b}-ZZZ-Nₐ-n_{q}3′ (Ib);

5′nₚ-Nₐ-XXX-N_{b}-YYY-Nₐ-n_{q}3′ (Ic); or

5′nₚ-Nₐ-XXX-N_{b}-YYY-N_{b}-ZZZ-Nₐ-n_{q}3′ (Id).

[0546] When the sense strand is represented by formula (Ib), N_{b} represents an oligonucleotide sequence comprising 0-10, 0-7, 0-5, 0-4, 0-2 or 0 modified nucleotides.

[0547] Each Nₐ independently can represent an oligonucleotide sequence comprising 2-20, 2-15, or 2-10 modified nucleotides.

[0548] When the sense strand is represented as formula (Ic), N_{b} represents an oligonucleotide sequence comprising 0-10, 0-7, 0-10, 0-7, 0-5, 0-4, 0-2 or 0 modified nucleotides. Each Nₐ can independently represent an oligonucleotide sequence comprising 2-20, 2-15, or 2-10 modified nucleotides.

[0549] When the sense strand is represented as formula (Id), each N_{b} independently represents an oligonucleotide sequence comprising 0-10, 0-7, 0-5, 0-4, 0-2 or 0 modified nucleotides. Preferably, N_{b} is 0, 1, 2, 3, 4, 5 or 6. Each Nₐ can independently represent an oligonucleotide sequence comprising 2-20, 2-15, or 2-10 modified nucleotides.

[0550] Each of X, Y and Z may be the same or different from each other.

[0551] In other embodiments, i is 0 and j is 0, and the sense strand may be represented by the formula:

5′nₚ-Nₐ-YYY-Nₐ-n_{q}3′ (Ia).

[0552] When the sense strand is represented by formula (Ia), each Nₐ independently can represent an oligonucleotide sequence comprising 2-20, 2-15, or 2-10 modified nucleotides.

[0553] In one embodiment, the antisense strand sequence of the RNAi may be represented by formula (II):

5′n_{q′}-Nₐ′-(Z′Z′Z′)ₖ-N_{b}′-Y′Y′Y′-N_{b}′-(X′X′X′)ₗ-N′ₐ-nₚ′3′ (II)

[0554] wherein:
[0555] k and l are each independently 0 or 1;
[0556] p′ and q′ are each independently 0-6;
[0557] each Nₐ′ independently represents an oligonucleotide sequence comprising 0-25 modified nucleotides, each sequence comprising at least two differently modified nucleotides;
[0558] each N_{b}′ independently represents an oligonucleotide sequence comprising 0-10 modified nucleotides;
[0559] each nₚ′ and n_{q}′ independently represent an overhang nucleotide;
[0560] wherein N_{b}′ and Y′ do not have the same modification; and
[0561] X′X′X′, Y′Y′Y′ and Z′Z′Z′ each independently represent one motif of three identical modifications on three consecutive nucleotides.

[0562] In one embodiment, the Nₐ′ or N_{b}′ comprise modifications of alternating pattern.

[0563] The Y′Y′Y′ motif occurs at or near the cleavage site of the antisense strand. For example, when the RNAi agent has a duplex region of 17-23 nucleotide in length, the Y′Y′Y′ motif can occur at positions 9, 10, 11; 10, 11, 12; 11, 12, 13; 12, 13, 14; or 13, 14, 15 of the antisense strand, with the count starting from the 1^{st} nucleotide, from the 5′-end; or optionally, the count starting at the 1^{st} paired nucleotide within the duplex region, from the 5′-end. Preferably, the Y′Y′Y′ motif occurs at positions 11, 12, 13.

[0564] In one embodiment, Y′Y′Y′ motif is all 2′-OMe modified nucleotides.

[0565] In one embodiment, k is 1 and l is 0, or k is 0 and l is 1, or both k and l are 1.

[0566] The antisense strand can therefore be represented by the following formulas:

5′n_{q}′-Nₐ′-Z′Z′Z′-N_{b}′-Y′Y′Y′-Nₐ′-nₚ,3′ (IIb);

5′n_{q′}-Nₐ′-Y′Y′Y′-N_{b}′-X′X′X′-nₚ,3′ (IIc); or

5′n_{q′}-Nₐ′-Z′Z′Z′-N_{b}′-Y′Y′Y′-N_{b}′-X′X′X′-Nₐ′-n_{p′}3′ (IId).

[0567] When the antisense strand is represented by formula (IIb), N_{b}′ represents an oligonucleotide sequence comprising 0-10, 0-7, 0-10, 0-7, 0-5, 0-4, 0-2 or 0 modified nucleotides. Each Nₐ′ independently represents an oligonucleotide sequence comprising 2-20, 2-15, or 2-10 modified nucleotides.

[0568] When the antisense strand is represented as formula (IIc), N_{b}′ represents an oligonucleotide sequence comprising 0-10, 0-7, 0-10, 0-7, 0-5, 0-4, 0-2 or 0 modified nucleotides. Each Nₐ′ independently represents an oligonucleotide sequence comprising 2-20, 2-15, or 2-10 modified nucleotides.

[0569] When the antisense strand is represented as formula (IId), each N_{b}′ independently represents an oligonucleotide sequence comprising 0-10, 0-7, 0-10, 0-7, 0-5, 0-4, 0-2 or 0 modified nucleotides. Each Nₐ′ independently represents an oligonucleotide sequence comprising 2-20, 2-15, or 2-10 modified nucleotides. Preferably, N_{b} is 0, 1, 2, 3, 4, 5 or 6.

[0570] In other embodiments, k is 0 and l is 0 and the antisense strand may be represented by the formula:

5′n_{p′}-N_{a′}-Y′Y′Y′-N_{a′}-n_{q′}3′ (Ia).

[0571] When the antisense strand is represented as formula (IIa), each Nₐ′ independently represents an oligonucleotide sequence comprising 2-20, 2-15, or 2-10 modified nucleotides.

[0572] Each of X′, Y′ and Z′ may be the same or different from each other.

[0573] Each nucleotide of the sense strand and antisense strand may be independently modified with LNA, HNA, CeNA, 2′-methoxyethyl, 2′-O-methyl, 2′-O-allyl, 2′-C-allyl, 2′-hydroxyl, or 2′-fluoro. For example, each nucleotide of the sense strand and antisense strand is independently modified with 2′-O-methyl or 2′-fluoro. Each X, Y, Z, X′, Y′ and Z′, in particular, may represent a 2′-O-methyl modification or a 2′-fluoro modification.

[0574] In one embodiment, the sense strand of the RNAi agent may contain YYY motif occurring at 9, 10 and 11 positions of the strand when the duplex region is 21 nt, the count starting from the 1^{st} nucleotide from the 5′-end, or optionally, the count starting at the 1^{st} paired nucleotide within the duplex region, from the 5′-end; and Y represents 2′-F modification. The sense strand may additionally contain XXX motif or ZZZ motifs as wing modifications at the opposite end of the duplex region; and XXX and ZZZ each independently represents a 2′-OMe modification or 2′-F modification.

[0575] In one embodiment the antisense strand may contain Y′Y′Y′ motif occurring at positions 11, 12, 13 of the strand, the count starting from the 1^{st} nucleotide from the 5′-end, or optionally, the count starting at the 1^{st} paired nucleotide within the duplex region, from the 5′-end; and Y′ represents 2′-O-methyl modification. The antisense strand may additionally contain X′X′X′ motif or Z′Z′Z′ motifs as wing modifications at the opposite end of the duplex region; and X′X′X′ and Z′Z′Z′ each independently represents a 2′-OMe modification or 2′-F modification.

[0576] The sense strand represented by any one of the above formulas (Ia), (Ib), (Ic), and (Id) forms a duplex with a antisense strand being represented by any one of formulas (IIa), (IIb), (IIc), and (IId), respectively.

[0577] Accordingly, the RNAi agents for use in the methods of the disclosure may comprise a sense strand and an antisense strand, each strand having 14 to 30 nucleotides, the RNAi duplex represented by formula (III):

sense: 5′nₚ-Nₐ-(XXX)ᵢ-N_{b}-YYY-N_{b}-(ZZZ)ⱼ-Nₐ-n_{q}3′

antisense: 3′nₚ′-Nₐ′-(X′X′X′)ₖ-N_{b}′-Y′Y′Y′-N_{b}′-(Z′Z′Z′)ₗ-Nₐ′-n_{q}′5′ (III)

[0578] wherein:
[0579] i, j, k, and l are each independently 0 or 1;
[0580] p, p′, q, and q′ are each independently 0-6;
[0581] each Nₐ and Nₐ′ independently represents an oligonucleotide sequence comprising 0-25 modified nucleotides, each sequence comprising at least two differently modified nucleotides;
[0582] each N_{b} and N_{b}′ independently represents an oligonucleotide sequence comprising 0-10 modified nucleotides;

[0583] wherein
[0584] each nₚ′, nₚ, n_{q}′, and n_{q}, each of which may or may not be present, independently represents an overhang nucleotide; and
[0585] XXX, YYY, ZZZ, X′X′X′, Y′Y′Y′, and Z′Z′Z′ each independently represent one motif of three identical modifications on three consecutive nucleotides.

[0586] In one embodiment, i is 0 and j is 0; or i is 1 and j is 0; or i is 0 and j is 1; or both i and j are 0; or both i and j are 1. In another embodiment, k is 0 and l is 0; or k is 1 and l is 0; k is 0 and l is 1; or both k and l are 0; or both k and l are 1.

[0587] Exemplary combinations of the sense strand and antisense strand forming a RNAi duplex include the formulas below:

5′nₚ-Nₐ-YYY-Nₐ-n_{q}3′

3′nₚ′-Nₐ′-Y′Y′Y′-Nₐ′n_{q}′5′ (IIIa)

5′nₚ-Nₐ-YYY-N_{b}-ZZZ-Nₐ-n_{q}3′

3′nₚ′-Nₐ′-Y′Y′Y′-N_{b}′-Z′Z′Z′-Nₐ′n_{q}′5′ (IIIb)

5′nₚ-Nₐ-XXX-N_{b}-YYY-Nₐ-n_{q}3′

3′nₚ′-Nₐ′-X′X′X′-N_{b}′-Y′Y′Y′-Nₐ′-n_{q}′5′ (IIIc)

5′nₚ-Nₐ-XXX-N_{b}-YYY-N_{b}-ZZZ-Nₐ-n_{q}3′

3′nₚ′-Nₐ′-X′X′X′-N_{b}′-Y′Y′Y′-N_{b}′-Z′Z′Z′-Nₐ-n_{q}′5′ (IIId)

[0588] When the RNAi agent is represented by formula (IIIa), each Nₐ independently represents an oligonucleotide sequence comprising 2-20, 2-15, or 2-10 modified nucleotides.

[0589] When the RNAi agent is represented by formula (IIIb), each N_{b} independently represents an oligonucleotide sequence comprising 1-10, 1-7, 1-5 or 1-4 modified nucleotides. Each Nₐ independently represents an oligonucleotide sequence comprising 2-20, 2-15, or 2-10 modified nucleotides.

[0590] When the RNAi agent is represented as formula (IIIc), each N_{b}, N_{b}′ independently represents an oligonucleotide sequence comprising 0-10, 0-7, 0-10, 0-7, 0-5, 0-4, 0-2 or 0 modified nucleotides. Each Nₐ independently represents an oligonucleotide sequence comprising 2-20, 2-15, or 2-10 modified nucleotides.

[0591] When the RNAi agent is represented as formula (IIId), each N_{b}, N_{b}′ independently represents an oligonucleotide sequence comprising 0-10, 0-7, 0-10, 0-7, 0-5, 0-4, 0-2 or 0 modified nucleotides. Each Nₐ, Nₐ′ independently represents an oligonucleotide sequence comprising 2-20, 2-15, or 2-10 modified nucleotides. Each of Nₐ, Nₐ′, N_{b} and N_{b}′ independently comprises modifications of alternating pattern.

[0592] In one embodiment, when the RNAi agent is represented by formula (IIId), the Nₐ modifications are 2′-O-methyl or 2′-fluoro modifications. In another embodiment, when the RNAi agent is represented by formula (IIId), the Nₐ modifications are 2′-O-methyl or 2′-fluoro modifications and nₚ′>0 and at least one nₚ′ is linked to a neighboring nucleotide a via phosphorothioate linkage. In yet another embodiment, when the RNAi agent is represented by formula (IIId), the Nₐ modifications are 2′-O-methyl or 2′-fluoro modifications, nₚ′>0 and at least one nₚ′ is linked to a neighboring nucleotide via phosphorothioate linkage, and the sense strand is conjugated to one or more C16 (or related) moieties attached through a bivalent or trivalent branched linker (described below). In another embodiment, when the RNAi agent is represented by formula (IIId), the Nₐ modifications are 2′-O-methyl or 2′-fluoro modifications, nₚ′>0 and at least one nₚ′ is linked to a neighboring nucleotide via phosphorothioate linkage, the sense strand comprises at least one phosphorothioate linkage, and the sense strand is conjugated to one or more lipophilic, e.g., C16 (or related) moieties, optionally attached through a bivalent or trivalent branched linker.

[0593] In one embodiment, when the RNAi agent is represented by formula (IIIa), the Nₐ modifications are 2′-O-methyl or 2′-fluoro modifications, nₚ′>0 and at least one nₚ′ is linked to a neighboring nucleotide via phosphorothioate linkage, the sense strand comprises at least one phosphorothioate linkage, and the sense strand is conjugated to one or more lipophilic, e.g., C16 (or related) moieties attached through a bivalent or trivalent branched linker.

[0594] In one embodiment, the RNAi agent is a multimer containing at least two duplexes represented by formula (III), (IIIa), (IIb), (IIc), and (IIId), wherein the duplexes are connected by a linker. The linker can be cleavable or non-cleavable. Optionally, the multimer further comprises a ligand. Each of the duplexes can target the same gene or two different genes; or each of the duplexes can target same gene at two different target sites.

[0595] In one embodiment, the RNAi agent is a multimer containing three, four, five, six or more duplexes represented by formula (III), (IIIa), (IIb), (IIc), and (IIId), wherein the duplexes are connected by a linker. The linker can be cleavable or non-cleavable. Optionally, the multimer further comprises a ligand. Each of the duplexes can target the same gene or two different genes; or each of the duplexes can target same gene at two different target sites.

[0596] In one embodiment, two RNAi agents represented by formula (III), (IIIa), (IIb), (IIc), and (IIId) are linked to each other at the 5′ end, and one or both of the 3′ ends and are optionally conjugated to to a ligand. Each of the agents can target the same gene or two different genes; or each of the agents can target same gene at two different target sites.

[0597] Various publications describe multimeric RNAi agents that can be used in the methods of the disclosure. Such publications include WO2007/091269, WO2010/141511, WO2007/117686, WO2009/014887, and WO2011/031520; and U.S. Pat. No. 7,858,769, the entire contents of each of which are hereby incorporated herein by reference.

[0598] In certain embodiments, the compositions and methods of the disclosure include a vinyl phosphonate (VP) modification of an RNAi agent as described herein. In exemplary embodiments, a 5′-vinyl phosphonate modified nucleotide of the disclosure has the structure:

[chemical structure]

[0599] wherein X is O or S;
[0600] R is hydrogen, hydroxy, fluoro, or C₁₋₂₀alkoxy (e.g., methoxy or n-hexadecyloxy);
[0601] R^{5′} is ═C(H)—P(O)(OH)₂ and the double bond between the C5′ carbon and R5′ is in the E or Z orientation (e.g., E orientation); and
[0602] B is a nucleobase or a modified nucleobase, optionally where B is adenine, guanine, cytosine, thymine, or uracil.

[0603] In one embodiment, R^{5′} is ═C(H)—P(O)(OH)₂ and the double bond between the C5′ carbon and R5′ is in the E orientation. In another embodiment, R is methoxy and R^{5′} is ═C(H)—P(O)(OH)₂ and the double bond between the C5′ carbon and R5′ is in the E orientation. In another embodiment, X is S, R is methoxy, and R^{5′} is ═C(H)—P(O)(OH)₂ and the double bond between the C5′ carbon and R5′ is in the E orientation.

[0604] A vinyl phosphonate of the instant disclosure may be attached to either the antisense or the sense strand of a dsRNA of the disclosure. In certain preferred embodiments, a vinyl phosphonate of the instant disclosure is attached to the antisense strand of a dsRNA, optionally at the 5′ end of the antisense strand of the dsRNA.

[0605] Vinyl phosphate modifications are also contemplated for the compositions and methods of the instant disclosure. An exemplary vinyl phosphate structure includes the preceding structure, where R^{5′} is ═C(H)—OP(O)(OH)₂ and the double bond between the C5′ carbon and R^{5′} is in the E or Z orientation (e.g., E orientation).

### E. Thermally Destabilizing Modifications

[0606] In certain embodiments, a dsRNA molecule can be optimized for RNA interference by incorporating thermally destabilizing modifications in the seed region of the antisense strand. As used herein “seed region” means at positions 2-9 of the 5′-end of the referenced strand. For example, thermally destabilizing modifications can be incorporated in the seed region of the antisense strand to reduce or inhibit off-target gene silencing.

[0607] The term “thermally destabilizing modification(s)” includes modification(s) that would result with a dsRNA with a lower overall melting temperature (Tm) than the Tm of the dsRNA without having such modification(s). For example, the thermally destabilizing modification(s) can decrease the Tm of the dsRNA by 1-4° C., such as one, two, three or four degrees Celcius. And, the term “thermally destabilizing nucleotide” refers to a nucleotide containing one or more thermally destabilizing modifications.

[0608] It has been discovered that dsRNAs with an antisense strand comprising at least one thermally destabilizing modification of the duplex within the first 9 nucleotide positions, counting from the 5′ end, of the antisense strand have reduced off-target gene silencing activity. Accordingly, in some embodiments, the antisense strand comprises at least one (e.g., one, two, three, four, five or more) thermally destabilizing modification of the duplex within the first 9 nucleotide positions of the 5′ region of the antisense strand. In some embodiments, one or more thermally destabilizing modification(s) of the duplex is/are located in positions 2-9, or preferably positions 4-8, from the 5′-end of the antisense strand. In some further embodiments, the thermally destabilizing modification(s) of the duplex is/are located at position 6, 7 or 8 from the 5′-end of the antisense strand. In still some further embodiments, the thermally destabilizing modification of the duplex is located at position 7 from the 5′-end of the antisense strand. In some embodiments, the thermally destabilizing modification of the duplex is located at position 2, 3, 4, 5 or 9 from the 5′-end of the antisense strand.

[0609] The thermally destabilizing modifications can include, but are not limited to, abasic modification; mismatch with the opposing nucleotide in the opposing strand; and sugar modification such as 2′-deoxy modification, acyclic nucleotide, e.g., unlocked nucleic acids (UNA) or glycol nucleic acid (GNA); and 2′-5′-linked ribonucleotides (“3′-RNA”).

[0610] Exemplified abasic modifications include, but are not limited to the following:

[chemical structure]

### Wherein R=H, Me, Et or OMe; R′=H, Me, Et or OMe; R″=H, Me, Et or OMe

[chemical structure]

wherein B is a modified or unmodified nucleobase.

[0612] Exemplified sugar modifications include, but are not limited to the following:

[chemical structure]

wherein B is a modified or unmodified nucleobase.

[0613] In some embodiments the thermally destabilizing modification of the duplex is selected from the group consisting of:

[chemical structure]

wherein B is a modified or unmodified nucleobase and the asterisk on each structure represents either R, S or racemic.

[0614] In some embodiments the thermally destabilizing modification of the duplex is selected from the group consisting of:

[chemical structure]

wherein B is a modified or unmodified nucleobase and the asterisk represents either R, S or racemic (e.g. S).

[0615] The term “acyclic nucleotide” refers to any nucleotide having an acyclic ribose sugar, for example, where any of bonds between the ribose carbons (e.g., C1′-C2′, C2′-C3′, C3′-C4′, C4′-O4′, or C1′-O4′) is absent or at least one of ribose carbons or oxygen (e.g., C1′, C2′, C3′, C4′, or O4′) are independently or in combination absent from the nucleotide. In some embodiments, acyclic nucleotide is

[chemical structure]

wherein B is a modified or unmodified nucleobase, R¹ and R² independently are H, halogen, OR₃, or alkyl; and R₃ is H, alkyl, cycloalkyl, aryl, aralkyl, heteroaryl or sugar). The term “UNA” refers to unlocked acyclic nucleic acid, wherein any of the bonds of the sugar has been removed, forming an unlocked “sugar” residue. In one example, UNA also encompasses monomers with bonds between C1-C4′ being removed (i.e. the covalent carbon-oxygen-carbon bond between the C1′ and C4′ carbons). In another example, the C2′-C3′ bond (i.e. the covalent carbon-carbon bond between the C2′ and C3′ carbons) of the sugar is removed (see Mikhailov et. al., Tetrahedron Letters, 26 (17): 2059 (1985); and Fluiter et al., Mol. Biosyst., 10: 1039 (2009), which are hereby incorporated by reference in their entirety). The acyclic derivative provides greater backbone flexibility without affecting the Watson-Crick pairings. The acyclic nucleotide can be linked via 2′-5′ or 3′-5′ linkage.

[0616] The term ‘GNA’ refers to glycol nucleic acid which is a polymer similar to DNA or RNA but differing in the composition of its “backbone” in that is composed of repeating glycerol units linked by phosphodiester bonds:

[chemical structure]

[0617] The thermally destabilizing modification of the duplex can be mismatches (i.e., noncomplementary base pairs) between the thermally destabilizing nucleotide and the opposing nucleotide in the opposite strand within the dsRNA duplex. Exemplary mismatch base pairs include G:G, G:A, G:U, G:T, A:A, A:C, C:C, C:U, C:T, U:U, T:T, U:T, or a combination thereof. Other mismatch base pairings known in the art are also amenable to the present invention. A mismatch can occur between nucleotides that are either naturally occurring nucleotides or modified nucleotides, i.e., the mismatch base pairing can occur between the nucleobases from respective nucleotides independent of the modifications on the ribose sugars of the nucleotides. In certain embodiments, the dsRNA molecule contains at least one nucleobase in the mismatch pairing that is a 2′-deoxy nucleobase; e.g., the 2′-deoxy nucleobase is in the sense strand.

[0618] In some embodiments, the thermally destabilizing modification of the duplex in the seed region of the antisense strand includes nucleotides with impaired Watson-Crick hydrogen-bonding to the complementary base on the target mRNA, such as modified nucleobases:

[chemical structure]

[0619] More examples of abasic nucleotide, acyclic nucleotide modifications (including UNA and GNA), and mismatch modifications have been described in detail in WO 2011/133876, which is herein incorporated by reference in its entirety.

[0620] The thermally destabilizing modifications may also include universal base with reduced or abolished capability to form hydrogen bonds with the opposing bases, and phosphate modifications.

[0621] In some embodiments, the thermally destabilizing modification of the duplex includes nucleotides with non-canonical bases such as, but not limited to, nucleobase modifications with impaired or completely abolished capability to form hydrogen bonds with bases in the opposite strand. These nucleobase modifications have been evaluated for destabilization of the central region of the dsRNA duplex as described in WO 2010/0011895, which is herein incorporated by reference in its entirety. Exemplary nucleobase modifications are:

[chemical structure]

[0622] In some embodiments, the thermally destabilizing modification of the duplex in the seed region of the antisense strand includes one or more α-nucleotide complementary to the base on the target mRNA, such as:

[chemical structure]

wherein R is H, OH, OCH₃, F, NH₂, NHMe, NMe₂ or O-alkyl.

[0623] Exemplary phosphate modifications known to decrease the thermal stability of dsRNA duplexes compared to natural phosphodiester linkages are:

[chemical structure]

[0624] The alkyl for the R group can be a C₁-C₆alkyl. Specific alkyls for the R group include, but are not limited to methyl, ethyl, propyl, isopropyl, butyl, pentyl and hexyl.

[0625] As the skilled artisan will recognize, in view of the functional role of nucleobases is defining specificity of a RNAi agent of the disclosure, while nucleobase modifications can be performed in the various manners as described herein, e.g., to introduce destabilizing modifications into a RNAi agent of the disclosure, e.g., for purpose of enhancing on-target effect relative to off-target effect, the range of modifications available and, in general, present upon RNAi agents of the disclosure tends to be much greater for non-nucleobase modifications, e.g., modifications to sugar groups or phosphate backbones of polyribonucleotides. Such modifications are described in greater detail in other sections of the instant disclosure and are expressly contemplated for RNAi agents of the disclosure, either possessing native nucleobases or modified nucleobases as described above or elsewhere herein.

[0626] In addition to the antisense strand comprising a thermally destabilizing modification, the dsRNA can also comprise one or more stabilizing modifications. For example, the dsRNA can comprise at least two (e.g., two, three, four, five, six, seven, eight, nine, ten or more) stabilizing modifications. Without limitations, the stabilizing modifications all can be present in one strand. In some embodiments, both the sense and the antisense strands comprise at least two stabilizing modifications. The stabilizing modification can occur on any nucleotide of the sense strand or antisense strand. For instance, the stabilizing modification can occur on every nucleotide on the sense strand or antisense strand; each stabilizing modification can occur in an alternating pattern on the sense strand or antisense strand; or the sense strand or antisense strand comprises both stabilizing modification in an alternating pattern. The alternating pattern of the stabilizing modifications on the sense strand may be the same or different from the antisense strand, and the alternating pattern of the stabilizing modifications on the sense strand can have a shift relative to the alternating pattern of the stabilizing modifications on the antisense strand.

[0627] In some embodiments, the antisense strand comprises at least two (e.g., two, three, four, five, six, seven, eight, nine, ten or more) stabilizing modifications. Without limitations, a stabilizing modification in the antisense strand can be present at any positions. In some embodiments, the antisense comprises stabilizing modifications at positions 2, 6, 8, 9, 14, and 16 from the 5′-end. In some other embodiments, the antisense comprises stabilizing modifications at positions 2, 6, 14, and 16 from the 5′-end. In still some other embodiments, the antisense comprises stabilizing modifications at positions 2, 14, and 16 from the 5′-end.

[0628] In some embodiments, the antisense strand comprises at least one stabilizing modification adjacent to the destabilizing modification. For example, the stabilizing modification can be the nucleotide at the 5′-end or the 3′-end of the destabilizing modification, i.e., at position −1 or +1 from the position of the destabilizing modification. In some embodiments, the antisense strand comprises a stabilizing modification at each of the 5′-end and the 3′-end of the destabilizing modification, i.e., positions −1 and +1 from the position of the destabilizing modification.

[0629] In some embodiments, the antisense strand comprises at least two stabilizing modifications at the 3′-end of the destabilizing modification, i.e., at positions +1 and +2 from the position of the destabilizing modification.

[0630] In some embodiments, the sense strand comprises at least two (e.g., two, three, four, five, six, seven, eight, nine, ten or more) stabilizing modifications. Without limitations, a stabilizing modification in the sense strand can be present at any positions. In some embodiments, the sense strand comprises stabilizing modifications at positions 7, 10, and 11 from the 5′-end. In some other embodiments, the sense strand comprises stabilizing modifications at positions 7, 9, 10, and 11 from the 5′-end. In some embodiments, the sense strand comprises stabilizing modifications at positions opposite or complimentary to positions 11, 12, and 15 of the antisense strand, counting from the 5′-end of the antisense strand. In some other embodiments, the sense strand comprises stabilizing modifications at positions opposite or complimentary to positions 11, 12, 13, and 15 of the antisense strand, counting from the 5′-end of the antisense strand. In some embodiments, the sense strand comprises a block of two, three, or four stabilizing modifications.

[0631] In some embodiments, the sense strand does not comprise a stabilizing modification in position opposite or complimentary to the thermally destabilizing modification of the duplex in the antisense strand.

[0632] Exemplary thermally stabilizing modifications include, but are not limited to, 2′-fluoro modifications. Other thermally stabilizing modifications include, but are not limited to, LNA.

[0633] In some embodiments, the dsRNA of the disclosure comprises at least four (e.g., four, five, six, seven, eight, nine, ten, or more) 2′-fluoro nucleotides. Without limitations, the 2′-fluoro nucleotides all can be present in one strand. In some embodiments, both the sense and the antisense strands comprise at least two 2′-fluoro nucleotides. The 2′-fluoro modification can occur on any nucleotide of the sense strand or antisense strand. For instance, the 2′-fluoro modification can occur on every nucleotide on the sense strand or antisense strand; each 2′-fluoro modification can occur in an alternating pattern on the sense strand or antisense strand; or the sense strand or antisense strand comprises both 2′-fluoro modifications in an alternating pattern. The alternating pattern of the 2′-fluoro modifications on the sense strand may be the same or different from the antisense strand, and the alternating pattern of the 2′-fluoro modifications on the sense strand can have a shift relative to the alternating pattern of the 2′-fluoro modifications on the antisense strand.

[0634] In some embodiments, the antisense strand comprises at least two (e.g., two, three, four, five, six, seven, eight, nine, ten, or more) 2′-fluoro nucleotides. Without limitations, a 2′-fluoro modification in the antisense strand can be present at any positions. In some embodiments, the antisense comprises 2′-fluoro nucleotides at positions 2, 6, 8, 9, 14, and 16 from the 5′-end. In some other embodiments, the antisense comprises 2′-fluoro nucleotides at positions 2, 6, 14, and 16 from the 5′-end. In still some other embodiments, the antisense comprises 2′-fluoro nucleotides at positions 2, 14, and 16 from the 5′-end.

[0635] In some embodiments, the antisense strand comprises at least one 2′-fluoro nucleotide adjacent to the destabilizing modification. For example, the 2′-fluoro nucleotide can be the nucleotide at the 5′-end or the 3′-end of the destabilizing modification, i.e., at position −1 or +1 from the position of the destabilizing modification. In some embodiments, the antisense strand comprises a 2′-fluoro nucleotide at each of the 5′-end and the 3′-end of the destabilizing modification, i.e., positions −1 and +1 from the position of the destabilizing modification.

[0636] In some embodiments, the antisense strand comprises at least two 2′-fluoro nucleotides at the 3′-end of the destabilizing modification, i.e., at positions +1 and +2 from the position of the destabilizing modification.

[0637] In some embodiments, the sense strand comprises at least two (e.g., two, three, four, five, six, seven, eight, nine, ten, or more) 2′-fluoro nucleotides. Without limitations, a 2′-fluoro modification in the sense strand can be present at any positions. In some embodiments, the antisense comprises 2′-fluoro nucleotides at positions 7, 10, and 11 from the 5′-end. In some other embodiments, the sense strand comprises 2′-fluoro nucleotides at positions 7, 9, 10, and 11 from the 5′-end. In some embodiments, the sense strand comprises 2′-fluoro nucleotides at positions opposite or complimentary to positions 11, 12, and 15 of the antisense strand, counting from the 5′-end of the antisense strand. In some other embodiments, the sense strand comprises 2′-fluoro nucleotides at positions opposite or complimentary to positions 11, 12, 13, and 15 of the antisense strand, counting from the 5′-end of the antisense strand. In some embodiments, the sense strand comprises a block of two, three or four 2′-fluoro nucleotides.

[0638] In some embodiments, the sense strand does not comprise a 2′-fluoro nucleotide in position opposite or complimentary to the thermally destabilizing modification of the duplex in the antisense strand.

[0639] In some embodiments, the dsRNA molecule of the disclosure comprises a 21 nucleotides (nt) sense strand and a 23 nucleotides (nt) antisense, wherein the antisense strand contains at least one thermally destabilizing nucleotide, where the at least one thermally destabilizing nucleotide occurs in the seed region of the antisense strand (i.e., at position 2-9 of the 5′-end of the antisense strand), wherein one end of the dsRNA is blunt, while the other end is comprises a 2 nt overhang, and wherein the dsRNA optionally further has at least one (e.g., one, two, three, four, five, six or all seven) of the following characteristics: (i) the antisense comprises 2, 3, 4, 5, or 6 2′-fluoro modifications; (ii) the antisense comprises 1, 2, 3, 4, or 5 phosphorothioate internucleotide linkages; (iii) the sense strand is conjugated with a ligand; (iv) the sense strand comprises 2, 3, 4, or 5 2′-fluoro modifications; (v) the sense strand comprises 1, 2, 3, 4, or 5 phosphorothioate internucleotide linkages; (vi) the dsRNA comprises at least four 2′-fluoro modifications; and (vii) the dsRNA comprises a blunt end at 5′-end of the antisense strand. Preferably, the 2 nt overhang is at the 3′-end of the antisense.

[0640] In some embodiments, the dsRNA molecule of the disclosure comprising a sense and antisense strands, wherein: the sense strand is 25-30 nucleotide residues in length, wherein starting from the 5′ terminal nucleotide (position 1), positions 1 to 23 of said sense strand comprise at least 8 ribonucleotides; antisense strand is 36-66 nucleotide residues in length and, starting from the 3′ terminal nucleotide, at least 8 ribonucleotides in the positions paired with positions 1-23 of sense strand to form a duplex; wherein at least the 3′ terminal nucleotide of antisense strand is unpaired with sense strand, and up to 6 consecutive 3′ terminal nucleotides are unpaired with sense strand, thereby forming a 3′ single stranded overhang of 1-6 nucleotides; wherein the 5′ terminus of antisense strand comprises from 10-30 consecutive nucleotides which are unpaired with sense strand, thereby forming a 10-30 nucleotide single stranded 5′ overhang; wherein at least the sense strand 5′ terminal and 3′ terminal nucleotides are base paired with nucleotides of antisense strand when sense and antisense strands are aligned for maximum complementarity, thereby forming a substantially duplexed region between sense and antisense strands; and antisense strand is sufficiently complementary to a target RNA along at least 19 ribonucleotides of antisense strand length to reduce target gene expression when said double stranded nucleic acid is introduced into a mammalian cell; and wherein the antisense strand contains at least one thermally destabilizing nucleotide, where at least one thermally destabilizing nucleotide is in the seed region of the antisense strand (i.e. at position 2-9 of the 5′-end of the antisense strand). For example, the thermally destabilizing nucleotide occurs between positions opposite or complimentary to positions 14-17 of the 5′-end of the sense strand, and wherein the dsRNA optionally further has at least one (e.g., one, two, three, four, five, six or all seven) of the following characteristics: (i) the antisense comprises 2, 3, 4, 5, or 6 2′-fluoro modifications; (ii) the antisense comprises 1, 2, 3, 4, or 5 phosphorothioate internucleotide linkages; (iii) the sense strand is conjugated with a ligand; (iv) the sense strand comprises 2, 3, 4, or 5 2′-fluoro modifications; (v) the sense strand comprises 1, 2, 3, 4, or 5 phosphorothioate internucleotide linkages; and (vi) the dsRNA comprises at least four 2′-fluoro modifications; and (vii) the dsRNA comprises a duplex region of 12-30 nucleotide pairs in length.

[0641] In some embodiments, the dsRNA molecule of the disclosure comprises a sense and antisense strands, wherein said dsRNA molecule comprises a sense strand having a length which is at least 25 and at most 29 nucleotides and an antisense strand having a length which is at most 30 nucleotides with the sense strand comprises a modified nucleotide that is susceptible to enzymatic degradation at position 11 from the 5′end, wherein the 3′ end of said sense strand and the 5′ end of said antisense strand form a blunt end and said antisense strand is 1-4 nucleotides longer at its 3′ end than the sense strand, wherein the duplex region which is at least 25 nucleotides in length, and said antisense strand is sufficiently complementary to a target mRNA along at least 19 nt of said antisense strand length to reduce target gene expression when said dsRNA molecule is introduced into a mammalian cell, and wherein dicer cleavage of said dsRNA preferentially results in an siRNA comprising said 3′ end of said antisense strand, thereby reducing expression of the target gene in the mammal, wherein the antisense strand contains at least one thermally destabilizing nucleotide, where the at least one thermally destabilizing nucleotide is in the seed region of the antisense strand (i.e. at position 2-9 of the 5′-end of the antisense strand), and wherein the dsRNA optionally further has at least one (e.g., one, two, three, four, five, six or all seven) of the following characteristics: (i) the antisense comprises 2, 3, 4, 5, or 6 2′-fluoro modifications; (ii) the antisense comprises 1, 2, 3, 4, or 5 phosphorothioate internucleotide linkages; (iii) the sense strand is conjugated with a ligand; (iv) the sense strand comprises 2, 3, 4, or 5 2′-fluoro modifications; (v) the sense strand comprises 1, 2, 3, 4, or 5 phosphorothioate internucleotide linkages; and (vi) the dsRNA comprises at least four 2′-fluoro modifications; and (vii) the dsRNA has a duplex region of 12-29 nucleotide pairs in length.

[0642] In some embodiments, every nucleotide in the sense strand and antisense strand of the dsRNA molecule may be modified. Each nucleotide may be modified with the same or different modification which can include one or more alteration of one or both of the non-linking phosphate oxygens or of one or more of the linking phosphate oxygens; alteration of a constituent of the ribose sugar, e.g., of the 2′ hydroxyl on the ribose sugar; wholesale replacement of the phosphate moiety with “dephospho” linkers; modification or replacement of a naturally occurring base; and replacement or modification of the ribose-phosphate backbone.

[0643] As nucleic acids are polymers of subunits, many of the modifications occur at a position which is repeated within a nucleic acid, e.g., a modification of a base, or a phosphate moiety, or a non-linking O of a phosphate moiety. In some cases, the modification will occur at all of the subject positions in the nucleic acid but in many cases it will not. By way of example, a modification may only occur at a 3′ or 5′ terminal position, may only occur in a terminal region, e.g., at a position on a terminal nucleotide or in the last 2, 3, 4, 5, or 10 nucleotides of a strand. A modification may occur in a double strand region, a single strand region, or in both. A modification may occur only in the double strand region of an RNA or may only occur in a single strand region of an RNA. E.g., a phosphorothioate modification at a non-linking O position may only occur at one or both termini, may only occur in a terminal region, e.g., at a position on a terminal nucleotide or in the last 2, 3, 4, 5, or 10 nucleotides of a strand, or may occur in double strand and single strand regions, particularly at termini. The 5′ end or ends can be phosphorylated.

[0644] It may be possible, e.g., to enhance stability, to include particular bases in overhangs, or to include modified nucleotides or nucleotide surrogates, in single strand overhangs, e.g., in a 5′ or 3′ overhang, or in both. E.g., it can be desirable to include purine nucleotides in overhangs. In some embodiments all or some of the bases in a 3′ or 5′ overhang may be modified, e.g., with a modification described herein. Modifications can include, e.g., the use of modifications at the 2′ position of the ribose sugar with modifications that are known in the art, e.g., the use of deoxyribonucleotides, 2′-deoxy-2′-fluoro (2′-F) or 2′-O-methyl modified instead of the ribosugar of the nucleobase, and modifications in the phosphate group, e.g., phosphorothioate modifications. Overhangs need not be homologous with the target sequence.

[0645] In some embodiments, each residue of the sense strand and antisense strand is independently modified with LNA, HNA, CeNA, 2′-methoxyethyl, 2′-O-methyl, 2′-O-allyl, 2′-C-allyl, 2′-deoxy, or 2′-fluoro. The strands can contain more than one modification. In some embodiments, each residue of the sense strand and antisense strand is independently modified with 2′-O-methyl or 2′-fluoro. It is to be understood that these modifications are in addition to the at least one thermally destabilizing modification of the duplex present in the antisense strand.

[0646] At least two different modifications are typically present on the sense strand and antisense strand. Those two modifications may be the 2′-deoxy, 2′-O-methyl or 2′-fluoro modifications, acyclic nucleotides or others. In some embodiments, the sense strand and antisense strand each comprises two differently modified nucleotides selected from 2′-O-methyl or 2′-deoxy. In some embodiments, each residue of the sense strand and antisense strand is independently modified with 2′-O-methyl nucleotide, 2′-deoxy nucleotide, 2′-deoxy-2′-fluoro nucleotide, 2′-O-N-methylacetamido (2′-O-NMA) nucleotide, a 2′-O-dimethylaminoethoxyethyl (2′-O-DMAEOE) nucleotide, 2′-O-aminopropyl (2′-O-AP) nucleotide, or 2′-ara-F nucleotide. Again, it is to be understood that these modifications are in addition to the at least one thermally destabilizing modification of the duplex present in the antisense strand.

[0647] In some embodiments, the dsRNA molecule of the disclosure comprises modifications of an alternating pattern. The term “alternating motif” or “alternative pattern” as used herein refers to a motif having one or more modifications, each modification occurring on alternating nucleotides of one strand. The alternating nucleotide may refer to one per every other nucleotide or one per every three nucleotides, or a similar pattern. For example, if A, B and C each represent one type of modification to the nucleotide, the alternating motif can be “ABABABABABAB . . . ,” “AABBAABBAABB . . . ,” “AABAABAABAAB . . . ,” “AAABAAABAAAB . . . ,” “AAABBBAAABBB . . . ,” or “ABCABCABCABC . . . ,” etc.

[0648] The type of modifications contained in the alternating motif may be the same or different. For example, if A, B, C, D each represent one type of modification on the nucleotide, the alternating pattern, i.e., modifications on every other nucleotide, may be the same, but each of the sense strand or antisense strand can be selected from several possibilities of modifications within the alternating motif such as “ABABAB . . . ”, “ACACAC . . . ” “BDBDBD . . . ” or “CDCDCD . . . ,” etc.

[0649] In some embodiments, the dsRNA molecule of the disclosure comprises the modification pattern for the alternating motif on the sense strand relative to the modification pattern for the alternating motif on the antisense strand is shifted. The shift may be such that the modified group of nucleotides of the sense strand corresponds to a differently modified group of nucleotides of the antisense strand and vice versa. For example, the sense strand when paired with the antisense strand in the dsRNA duplex, the alternating motif in the sense strand may start with “ABABAB” from 5′-3′ of the strand and the alternating motif in the antisense strand may start with “BABABA” from 3′-5′ of the strand within the duplex region. As another example, the alternating motif in the sense strand may start with “AABBAABB” from 5′-3′ of the strand and the alternating motif in the antisense strand may start with “BBAABBAA” from 3′-5′ of the strand within the duplex region, so that there is a complete or partial shift of the modification patterns between the sense strand and the antisense strand.

[0650] In one particular example, the alternating motif in the sense strand is “ABABAB” sfrom 5′-3′ of the strand, where each A is an unmodified ribonucleotide and each B is a 2′-Omethyl modified nucleotide.

[0651] In one particular example, the alternating motif in the sense strand is “ABABAB” sfrom 5′-3′ of the strand, where each A is an 2′-deoxy-2′-fluoro modified nucleotide and each B is a 2′-Omethyl modified nucleotide.

[0652] In another particular example, the alternating motif in the antisense strand is “BABABA” from 3′-5′ of the strand, where each A is a 2′-deoxy-2′-fluoro modified nucleotide and each B is a 2′-Omethyl modified nucleotide.

[0653] In one particular example, the alternating motif in the sense strand is “ABABAB” sfrom 5′-3′ of the strand and the alternating motif in the antisense strand is “BABABA” from 3′-5′ of the strand, where each A is an unmodified ribonucleotide and each B is a 2′-Omethyl modified nucleotide.

[0654] In one particular example, the alternating motif in the sense strand is “ABABAB” sfrom 5′-3′ of the strand and the alternating motif in the antisense strand is “BABABA” from 3′-5′ of the strand, where each A is a 2′-deoxy-2′-fluoro modified nucleotide and each B is a 2′-Omethyl modified nucleotide.

[0655] The dsRNA molecule of the disclosure may further comprise at least one phosphorothioate or methylphosphonate internucleotide linkage. The phosphorothioate or methylphosphonate internucleotide linkage modification may occur on any nucleotide of the sense strand or antisense strand or both in any position of the strand. For instance, the internucleotide linkage modification may occur on every nucleotide on the sense strand or antisense strand; each internucleotide linkage modification may occur in an alternating pattern on the sense strand or antisense strand; or the sense strand or antisense strand comprises both internucleotide linkage modifications in an alternating pattern. The alternating pattern of the internucleotide linkage modification on the sense strand may be the same or different from the antisense strand, and the alternating pattern of the internucleotide linkage modification on the sense strand may have a shift relative to the alternating pattern of the internucleotide linkage modification on the antisense strand.

[0656] In some embodiments, the dsRNA molecule comprises the phosphorothioate or methylphosphonate internucleotide linkage modification in the overhang region. For example, the overhang region comprises two nucleotides having a phosphorothioate or methylphosphonate internucleotide linkage between the two nucleotides. Internucleotide linkage modifications also may be made to link the overhang nucleotides with the terminal paired nucleotides within duplex region. For example, at least 2, 3, 4, or all the overhang nucleotides may be linked through phosphorothioate or methylphosphonate internucleotide linkage, and optionally, there may be additional phosphorothioate or methylphosphonate internucleotide linkages linking the overhang nucleotide with a paired nucleotide that is next to the overhang nucleotide. For instance, there may be at least two phosphorothioate internucleotide linkages between the terminal three nucleotides, in which two of the three nucleotides are overhang nucleotides, and the third is a paired nucleotide next to the overhang nucleotide. Preferably, these terminal three nucleotides may be at the 3′-end of the antisense strand.

[0657] In some embodiments, the sense strand of the dsRNA molecule comprises 1-10 blocks of two to ten phosphorothioate or methylphosphonate internucleotide linkages separated by 1, 2, 3, 4, 5, 6, 7, 8, 9, 10, 11, 12, 13, 14, 15, or 16 phosphate internucleotide linkages, wherein one of the phosphorothioate or methylphosphonate internucleotide linkages is placed at any position in the oligonucleotide sequence and the said sense strand is paired with an antisense strand comprising any combination of phosphorothioate, methylphosphonate and phosphate internucleotide linkages or an antisense strand comprising either phosphorothioate or methylphosphonate or phosphate linkage.

[0658] In some embodiments, the antisense strand of the dsRNA molecule comprises two blocks of two phosphorothioate or methylphosphonate internucleotide linkages separated by 1, 2, 3, 4, 5, 6, 7, 8, 9, 10, 11, 12, 13, 14, 15, 16, 17, or 18 phosphate internucleotide linkages, wherein one of the phosphorothioate or methylphosphonate internucleotide linkages is placed at any position in the oligonucleotide sequence and the said antisense strand is paired with a sense strand comprising any combination of phosphorothioate, methylphosphonate and phosphate internucleotide linkages or an antisense strand comprising either phosphorothioate or methylphosphonate or phosphate linkage.

[0659] In some embodiments, the antisense strand of the dsRNA molecule comprises two blocks of three phosphorothioate or methylphosphonate internucleotide linkages separated by 1, 2, 3, 4, 5, 6, 7, 8, 9, 10, 11, 12, 13, 14, 15, or 16 phosphate internucleotide linkages, wherein one of the phosphorothioate or methylphosphonate internucleotide linkages is placed at any position in the oligonucleotide sequence and the said antisense strand is paired with a sense strand comprising any combination of phosphorothioate, methylphosphonate and phosphate internucleotide linkages or an antisense strand comprising either phosphorothioate or methylphosphonate or phosphate linkage.

[0660] In some embodiments, the antisense strand of the dsRNA molecule comprises two blocks of four phosphorothioate or methylphosphonate internucleotide linkages separated by 1, 2, 3, 4, 5, 6, 7, 8, 9, 10, 11, 12, 13, or 14 phosphate internucleotide linkages, wherein one of the phosphorothioate or methylphosphonate internucleotide linkages is placed at any position in the oligonucleotide sequence and the said antisense strand is paired with a sense strand comprising any combination of phosphorothioate, methylphosphonate and phosphate internucleotide linkages or an antisense strand comprising either phosphorothioate or methylphosphonate or phosphate linkage.

[0661] In some embodiments, the antisense strand of the dsRNA molecule comprises two blocks of five phosphorothioate or methylphosphonate internucleotide linkages separated by 1, 2, 3, 4, 5, 6, 7, 8, 9, 10, 11, or 12 phosphate internucleotide linkages, wherein one of the phosphorothioate or methylphosphonate internucleotide linkages is placed at any position in the oligonucleotide sequence and the said antisense strand is paired with a sense strand comprising any combination of phosphorothioate, methylphosphonate and phosphate internucleotide linkages or an antisense strand comprising either phosphorothioate or methylphosphonate or phosphate linkage.

[0662] In some embodiments, the antisense strand of the dsRNA molecule comprises two blocks of six phosphorothioate or methylphosphonate internucleotide linkages separated by 1, 2, 3, 4, 5, 6, 7, 8, 9, or 10 phosphate internucleotide linkages, wherein one of the phosphorothioate or methylphosphonate internucleotide linkages is placed at any position in the oligonucleotide sequence and the said antisense strand is paired with a sense strand comprising any combination of phosphorothioate, methylphosphonate and phosphate internucleotide linkages or an antisense strand comprising either phosphorothioate or methylphosphonate or phosphate linkage.

[0663] In some embodiments, the antisense strand of the dsRNA molecule comprises two blocks of seven phosphorothioate or methylphosphonate internucleotide linkages separated by 1, 2, 3, 4, 5, 6, 7, or 8 phosphate internucleotide linkages, wherein one of the phosphorothioate or methylphosphonate internucleotide linkages is placed at any position in the oligonucleotide sequence and the said antisense strand is paired with a sense strand comprising any combination of phosphorothioate, methylphosphonate and phosphate internucleotide linkages or an antisense strand comprising either phosphorothioate or methylphosphonate or phosphate linkage.

[0664] In some embodiments, the antisense strand of the dsRNA molecule comprises two blocks of eight phosphorothioate or methylphosphonate internucleotide linkages separated by 1, 2, 3, 4, 5, or 6 phosphate internucleotide linkages, wherein one of the phosphorothioate or methylphosphonate internucleotide linkages is placed at any position in the oligonucleotide sequence and the said antisense strand is paired with a sense strand comprising any combination of phosphorothioate, methylphosphonate and phosphate internucleotide linkages or an antisense strand comprising either phosphorothioate or methylphosphonate or phosphate linkage.

[0665] In some embodiments, the antisense strand of the dsRNA molecule comprises two blocks of nine phosphorothioate or methylphosphonate internucleotide linkages separated by 1, 2, 3, or 4 phosphate internucleotide linkages, wherein one of the phosphorothioate or methylphosphonate internucleotide linkages is placed at any position in the oligonucleotide sequence and the said antisense strand is paired with a sense strand comprising any combination of phosphorothioate, methylphosphonate and phosphate internucleotide linkages or an antisense strand comprising either phosphorothioate or methylphosphonate or phosphate linkage.

[0666] In some embodiments, the dsRNA molecule of the disclosure further comprises one or more phosphorothioate or methylphosphonate internucleotide linkage modification within 1-10 nucleotides of the termini position(s) of the sense or antisense strand. For example, at least 2, 3, 4, 5, 6, 7, 8, 9, or 10 nucleotides may be linked through phosphorothioate or methylphosphonate internucleotide linkage at one end or both ends of the sense or antisense strand.

[0667] In some embodiments, the dsRNA molecule of the disclosure further comprises one or more phosphorothioate or methylphosphonate internucleotide linkage modification within 1-10 of the internal region of the duplex of each of the sense or antisense strand. For example, at least nucleotides 2, 3, 4, 5, 6, 7, 8, 9, or 10 nucleotides may be linked through phosphorothioate methylphosphonate internucleotide linkage at position 8-16 of the duplex region counting from the 5′-end of the sense strand; the dsRNA molecule can optionally further comprise one or more phosphorothioate or methylphosphonate internucleotide linkage modification within 1-10 of the termini position(s).

[0668] In some embodiments, the dsRNA molecule of the disclosure further comprises one to five phosphorothioate or methylphosphonate internucleotide linkage modification(s) within position 1-5 and one to five phosphorothioate or methylphosphonate internucleotide linkage modification(s) within position 18-23 of the sense strand (counting from the 5′-end), and one to five phosphorothioate or methylphosphonate internucleotide linkage modification at positions 1 and 2 and one to five within positions 18-23 of the antisense strand (counting from the 5′-end).

[0669] In some embodiments, the dsRNA molecule of the disclosure further comprises one phosphorothioate internucleotide linkage modification within position 1-5 and one phosphorothioate or methylphosphonate internucleotide linkage modification within position 18-23 of the sense strand (counting from the 5′-end), and one phosphorothioate internucleotide linkage modification at positions 1 or 2 and two phosphorothioate or methylphosphonate internucleotide linkage modifications within positions 18-23 of the antisense strand (counting from the 5′-end).

[0670] In some embodiments, the dsRNA molecule of the disclosure further comprises two phosphorothioate internucleotide linkage modifications within position 1-5 and one phosphorothioate internucleotide linkage modification within position 18-23 of the sense strand (counting from the 5′-end), and one phosphorothioate internucleotide linkage modification at positions 1 or 2 and two phosphorothioate internucleotide linkage modifications within positions 18-23 of the antisense strand (counting from the 5′-end).

[0671] In some embodiments, the dsRNA molecule of the disclosure further comprises two phosphorothioate internucleotide linkage modifications within position 1-5 and two phosphorothioate internucleotide linkage modifications within position 18-23 of the sense strand (counting from the 5′-end), and one phosphorothioate internucleotide linkage modification at positions 1 or 2 and two phosphorothioate internucleotide linkage modifications within positions 18-23 of the antisense strand (counting from the 5′-end).

[0672] In some embodiments, the dsRNA molecule of the disclosure further comprises two phosphorothioate internucleotide linkage modifications within position 1-5 and two phosphorothioate internucleotide linkage modifications within position 18-23 of the sense strand (counting from the 5′-end), and one phosphorothioate internucleotide linkage modification at positions 1 or 2 and one phosphorothioate internucleotide linkage modification within positions 18-23 of the antisense strand (counting from the 5′-end).

[0673] In some embodiments, the dsRNA molecule of the disclosure further comprises one phosphorothioate internucleotide linkage modification within position 1-5 and one phosphorothioate internucleotide linkage modification within position 18-23 of the sense strand (counting from the 5′-end), and two phosphorothioate internucleotide linkage modifications at positions 1 and 2 and two phosphorothioate internucleotide linkage modifications within positions 18-23 of the antisense strand (counting from the 5′-end).

[0674] In some embodiments, the dsRNA molecule of the disclosure further comprises one phosphorothioate internucleotide linkage modification within position 1-5 and one within position 18-23 of the sense strand (counting from the 5′-end), and two phosphorothioate internucleotide linkage modification at positions 1 and 2 and one phosphorothioate internucleotide linkage modification within positions 18-23 of the antisense strand (counting from the 5′-end).

[0675] In some embodiments, the dsRNA molecule of the disclosure further comprises one phosphorothioate internucleotide linkage modification within position 1-5 (counting from the 5′-end) of the sense strand, and two phosphorothioate internucleotide linkage modifications at positions 1 and 2 and one phosphorothioate internucleotide linkage modification within positions 18-23 of the antisense strand (counting from the 5′-end).

[0676] In some embodiments, the dsRNA molecule of the disclosure further comprises two phosphorothioate internucleotide linkage modifications within position 1-5 (counting from the 5′-end) of the sense strand, and one phosphorothioate internucleotide linkage modification at positions 1 and 2 and two phosphorothioate internucleotide linkage modifications within positions 18-23 of the antisense strand (counting from the 5′-end).

[0677] In some embodiments, the dsRNA molecule of the disclosure further comprises two phosphorothioate internucleotide linkage modifications within position 1-5 and one within position 18-23 of the sense strand (counting from the 5′-end), and two phosphorothioate internucleotide linkage modifications at positions 1 and 2 and one phosphorothioate internucleotide linkage modification within positions 18-23 of the antisense strand (counting from the 5′-end).

[0678] In some embodiments, the dsRNA molecule of the disclosure further comprises two phosphorothioate internucleotide linkage modifications within position 1-5 and one phosphorothioate internucleotide linkage modification within position 18-23 of the sense strand (counting from the 5′-end), and two phosphorothioate internucleotide linkage modifications at positions 1 and 2 and two phosphorothioate internucleotide linkage modifications within positions 18-23 of the antisense strand (counting from the 5′-end).

[0679] In some embodiments, the dsRNA molecule of the disclosure further comprises two phosphorothioate internucleotide linkage modifications within position 1-5 and one phosphorothioate internucleotide linkage modification within position 18-23 of the sense strand (counting from the 5′-end), and one phosphorothioate internucleotide linkage modification at positions 1 and 2 and two phosphorothioate internucleotide linkage modifications within positions 18-23 of the antisense strand (counting from the 5′-end).

[0680] In some embodiments, the dsRNA molecule of the disclosure further comprises two phosphorothioate internucleotide linkage modifications at position 1 and 2, and two phosphorothioate internucleotide linkage modifications at position 20 and 21 of the sense strand (counting from the 5′-end), and one phosphorothioate internucleotide linkage modification at positions 1 and one at position 21 of the antisense strand (counting from the 5′-end).

[0681] In some embodiments, the dsRNA molecule of the disclosure further comprises one phosphorothioate internucleotide linkage modification at position 1, and one phosphorothioate internucleotide linkage modification at position 21 of the sense strand (counting from the 5′-end), and two phosphorothioate internucleotide linkage modifications at positions 1 and 2 and two phosphorothioate internucleotide linkage modifications at positions 20 and 21 the antisense strand (counting from the 5′-end).

[0682] In some embodiments, the dsRNA molecule of the disclosure further comprises two phosphorothioate internucleotide linkage modifications at position 1 and 2, and two phosphorothioate internucleotide linkage modifications at position 21 and 22 of the sense strand (counting from the 5′-end), and one phosphorothioate internucleotide linkage modification at positions 1 and one phosphorothioate internucleotide linkage modification at position 21 of the antisense strand (counting from the 5′-end).

[0683] In some embodiments, the dsRNA molecule of the disclosure further comprises one phosphorothioate internucleotide linkage modification at position 1, and one phosphorothioate internucleotide linkage modification at position 21 of the sense strand (counting from the 5′-end), and two phosphorothioate internucleotide linkage modifications at positions 1 and 2 and two phosphorothioate internucleotide linkage modifications at positions 21 and 22 the antisense strand (counting from the 5′-end).

[0684] In some embodiments, the dsRNA molecule of the disclosure further comprises two phosphorothioate internucleotide linkage modifications at position 1 and 2, and two phosphorothioate internucleotide linkage modifications at position 22 and 23 of the sense strand (counting from the 5′-end), and one phosphorothioate internucleotide linkage modification at positions 1 and one phosphorothioate internucleotide linkage modification at position 21 of the antisense strand (counting from the 5′-end).

[0685] In some embodiments, the dsRNA molecule of the disclosure further comprises one phosphorothioate internucleotide linkage modification at position 1, and one phosphorothioate internucleotide linkage modification at position 21 of the sense strand (counting from the 5′-end), and two phosphorothioate internucleotide linkage modifications at positions 1 and 2 and two phosphorothioate internucleotide linkage modifications at positions 23 and 23 the antisense strand (counting from the 5′-end).

[0686] In some embodiments, compound of the disclosure comprises a pattern of backbone chiral centers. In some embodiments, a common pattern of backbone chiral centers comprises at least 5 internucleotidic linkages in the Sp configuration. In some embodiments, a common pattern of backbone chiral centers comprises at least 6 internucleotidic linkages in the Sp configuration. In some embodiments, a common pattern of backbone chiral centers comprises at least 7 internucleotidic linkages in the Sp configuration. In some embodiments, a common pattern of backbone chiral centers comprises at least 8 internucleotidic linkages in the Sp configuration. In some embodiments, a common pattern of backbone chiral centers comprises at least 9 internucleotidic linkages in the Sp configuration. In some embodiments, a common pattern of backbone chiral centers comprises at least 10 internucleotidic linkages in the Sp configuration. In some embodiments, a common pattern of backbone chiral centers comprises at least 11 internucleotidic linkages in the Sp configuration. In some embodiments, a common pattern of backbone chiral centers comprises at least 12 internucleotidic linkages in the Sp configuration. In some embodiments, a common pattern of backbone chiral centers comprises at least 13 internucleotidic linkages in the Sp configuration. In some embodiments, a common pattern of backbone chiral centers comprises at least 14 internucleotidic linkages in the Sp configuration. In some embodiments, a common pattern of backbone chiral centers comprises at least 15 internucleotidic linkages in the Sp configuration. In some embodiments, a common pattern of backbone chiral centers comprises at least 16 internucleotidic linkages in the Sp configuration. In some embodiments, a common pattern of backbone chiral centers comprises at least 17 internucleotidic linkages in the Sp configuration. In some embodiments, a common pattern of backbone chiral centers comprises at least 18 internucleotidic linkages in the Sp configuration. In some embodiments, a common pattern of backbone chiral centers comprises at least 19 internucleotidic linkages in the Sp configuration. In some embodiments, a common pattern of backbone chiral centers comprises no more than 8 internucleotidic linkages in the Rp configuration. In some embodiments, a common pattern of backbone chiral centers comprises no more than 7 internucleotidic linkages in the Rp configuration. In some embodiments, a common pattern of backbone chiral centers comprises no more than 6 internucleotidic linkages in the Rp configuration. In some embodiments, a common pattern of backbone chiral centers comprises no more than 5 internucleotidic linkages in the Rp configuration. In some embodiments, a common pattern of backbone chiral centers comprises no more than 4 internucleotidic linkages in the Rp configuration. In some embodiments, a common pattern of backbone chiral centers comprises no more than 3 internucleotidic linkages in the Rp configuration. In some embodiments, a common pattern of backbone chiral centers comprises no more than 2 internucleotidic linkages in the Rp configuration. In some embodiments, a common pattern of backbone chiral centers comprises no more than 1 internucleotidic linkages in the Rp configuration. In some embodiments, a common pattern of backbone chiral centers comprises no more than 8 internucleotidic linkages which are not chiral (as a non-limiting example, a phosphodiester). In some embodiments, a common pattern of backbone chiral centers comprises no more than 7 internucleotidic linkages which are not chiral. In some embodiments, a common pattern of backbone chiral centers comprises no more than 6 internucleotidic linkages which are not chiral. In some embodiments, a common pattern of backbone chiral centers comprises no more than 5 internucleotidic linkages which are not chiral. In some embodiments, a common pattern of backbone chiral centers comprises no more than 4 internucleotidic linkages which are not chiral. In some embodiments, a common pattern of backbone chiral centers comprises no more than 3 internucleotidic linkages which are not chiral. In some embodiments, a common pattern of backbone chiral centers comprises no more than 2 internucleotidic linkages which are not chiral. In some embodiments, a common pattern of backbone chiral centers comprises no more than 1 internucleotidic linkages which are not chiral. In some embodiments, a common pattern of backbone chiral centers comprises at least 10 internucleotidic linkages in the Sp configuration, and no more than 8 internucleotidic linkages which are not chiral. In some embodiments, a common pattern of backbone chiral centers comprises at least 11 internucleotidic linkages in the Sp configuration, and no more than 7 internucleotidic linkages which are not chiral. In some embodiments, a common pattern of backbone chiral centers comprises at least 12 internucleotidic linkages in the Sp configuration, and no more than 6 internucleotidic linkages which are not chiral. In some embodiments, a common pattern of backbone chiral centers comprises at least 13 internucleotidic linkages in the Sp configuration, and no more than 6 internucleotidic linkages which are not chiral. In some embodiments, a common pattern of backbone chiral centers comprises at least 14 internucleotidic linkages in the Sp configuration, and no more than 5 internucleotidic linkages which are not chiral. In some embodiments, a common pattern of backbone chiral centers comprises at least 15 internucleotidic linkages in the Sp configuration, and no more than 4 internucleotidic linkages which are not chiral. In some embodiments, the internucleotidic linkages in the Sp configuration are optionally contiguous or not contiguous. In some embodiments, the internucleotidic linkages in the Rp configuration are optionally contiguous or not contiguous. In some embodiments, the internucleotidic linkages which are not chiral are optionally contiguous or not contiguous.

[0687] In some embodiments, compound of the disclosure comprises a block that is a stereochemistry block. In some embodiments, a block is an Rp block in that each internucleotidic linkage of the block is Rp. In some embodiments, a 5′-block is an Rp block. In some embodiments, a 3′-block is an Rp block. In some embodiments, a block is an Sp block in that each internucleotidic linkage of the block is Sp. In some embodiments, a 5′-block is an Sp block. In some embodiments, a 3′-block is an Sp block. In some embodiments, provided oligonucleotides comprise both Rp and Sp blocks. In some embodiments, provided oligonucleotides comprise one or more Rp but no Sp blocks. In some embodiments, provided oligonucleotides comprise one or more Sp but no Rp blocks. In some embodiments, provided oligonucleotides comprise one or more PO blocks wherein each internucleotidic linkage in a natural phosphate linkage.

[0688] In some embodiments, compound of the disclosure comprises a 5′-block that is an Sp block wherein each sugar moiety comprises a 2′-F modification. In some embodiments, a 5′-block is an Sp block wherein each of internucleotidic linkage is a modified internucleotidic linkage and each sugar moiety comprises a 2′-F modification. In some embodiments, a 5′-block is an Sp block wherein each of internucleotidic linkage is a phosphorothioate linkage and each sugar moiety comprises a 2′-F modification. In some embodiments, a 5′-block comprises 4 or more nucleoside units. In some embodiments, a 5′-block comprises 5 or more nucleoside units. In some embodiments, a 5′-block comprises 6 or more nucleoside units. In some embodiments, a 5′-block comprises 7 or more nucleoside units. In some embodiments, a 3′-block is an Sp block wherein each sugar moiety comprises a 2′-F modification. In some embodiments, a 3′-block is an Sp block wherein each of internucleotidic linkage is a modified internucleotidic linkage and each sugar moiety comprises a 2′-F modification. In some embodiments, a 3′-block is an Sp block wherein each of internucleotidic linkage is a phosphorothioate linkage and each sugar moiety comprises a 2′-F modification. In some embodiments, a 3′-block comprises 4 or more nucleoside units. In some embodiments, a 3′-block comprises 5 or more nucleoside units. In some embodiments, a 3′-block comprises 6 or more nucleoside units. In some embodiments, a 3′-block comprises 7 or more nucleoside units.

[0689] In some embodiments, compound of the disclosure comprises a type of nucleoside in a region or an oligonucleotide is followed by a specific type of internucleotidic linkage, e.g., natural phosphate linkage, modified internucleotidic linkage, Rp chiral internucleotidic linkage, Sp chiral internucleotidic linkage, etc. In some embodiments, A is followed by Sp. In some embodiments, A is followed by Rp. In some embodiments, A is followed by natural phosphate linkage (PO). In some embodiments, U is followed by Sp. In some embodiments, U is followed by Rp. In some embodiments, U is followed by natural phosphate linkage (PO). In some embodiments, C is followed by Sp. In some embodiments, C is followed by Rp. In some embodiments, C is followed by natural phosphate linkage (PO). In some embodiments, G is followed by Sp. In some embodiments, G is followed by Rp. In some embodiments, G is followed by natural phosphate linkage (PO). In some embodiments, C and U are followed by Sp. In some embodiments, C and U are followed by Rp. In some embodiments, C and U are followed by natural phosphate linkage (PO). In some embodiments, A and G are followed by Sp. In some embodiments, A and G are followed by Rp.

[0690] In some embodiments, the antisense strand comprises phosphorothioate internucleotide linkages between nucleotide positions 21 and 22, and between nucleotide positions 22 and 23, wherein the antisense strand contains at least one thermally destabilizing modification of the duplex located in the seed region of the antisense strand (i.e., at position 2-9 of the 5′-end of the antisense strand), and wherein the dsRNA optionally further has at least one (e.g., one, two, three, four, five, six, seven or all eight) of the following characteristics: (i) the antisense comprises 2, 3, 4, 5, or 6 2′-fluoro modifications; (ii) the antisense comprises 3, 4, or 5 phosphorothioate internucleotide linkages; (iii) the sense strand is conjugated with a ligand; (iv) the sense strand comprises 2, 3, 4 or 5 2′-fluoro modifications; (v) the sense strand comprises 1, 2, 3, 4, or 5 phosphorothioate internucleotide linkages; (vi) the dsRNA comprises at least four 2′-fluoro modifications; (vii) the dsRNA comprises a duplex region of 12-40 nucleotide pairs in length; and (viii) the dsRNA has a blunt end at 5′-end of the antisense strand. In some embodiments, the antisense strand comprises phosphorothioate internucleotide linkages between nucleotide positions 1 and 2, between nucleotide positions 2 and 3, between nucleotide positions 21 and 22, and between nucleotide positions 22 and 23, wherein the antisense strand contains at least one thermally destabilizing modification of the duplex located in the seed region of the antisense strand (i.e., at position 2-9 of the 5′-end of the antisense strand), and wherein the dsRNA optionally further has at least one (e.g., one, two, three, four, five, six, seven or all eight) of the following characteristics: (i) the antisense comprises 2, 3, 4, 5, or 6 2′-fluoro modifications; (ii) the sense strand is conjugated with a ligand; (iii) the sense strand comprises 2, 3, 4 or 5 2′-fluoro modifications; (iv) the sense strand comprises 1, 2, 3, 4, or 5 phosphorothioate internucleotide linkages; (v) the dsRNA comprises at least four 2′-fluoro modifications; (vi) the dsRNA comprises a duplex region of 12-40 nucleotide pairs in length; (vii) the dsRNA comprises a duplex region of 12-40 nucleotide pairs in length; and (viii) the dsRNA has a blunt end at 5′-end of the antisense strand.

[0691] In some embodiments, the sense strand comprises phosphorothioate internucleotide linkages between nucleotide positions 1 and 2, and between nucleotide positions 2 and 3, wherein the antisense strand contains at least one thermally destabilizing modification of the duplex located in the seed region of the antisense strand (i.e., at position 2-9 of the 5′-end of the antisense strand), and wherein the dsRNA optionally further has at least one (e.g., one, two, three, four, five, six, seven or all eight) of the following characteristics: (i) the antisense comprises 2, 3, 4, 5, or 6 2′-fluoro modifications; (ii) the antisense comprises 1, 2, 3, 4, or 5 phosphorothioate internucleotide linkages; (iii) the sense strand is conjugated with a ligand; (iv) the sense strand comprises 2, 3, 4 or 5 2′-fluoro modifications; (v) the sense strand comprises 3, 4 or 5 phosphorothioate internucleotide linkages; (vi) the dsRNA comprises at least four 2′-fluoro modifications; (vii) the dsRNA comprises a duplex region of 12-40 nucleotide pairs in length; and (viii) the dsRNA has a blunt end at 5′-end of the antisense strand.

[0692] In some embodiments, the sense strand comprises phosphorothioate internucleotide linkages between nucleotide positions 1 and 2, and between nucleotide positions 2 and 3, the antisense strand comprises phosphorothioate internucleotide linkages between nucleotide positions 1 and 2, between nucleotide positions 2 and 3, between nucleotide positions 21 and 22, and between nucleotide positions 22 and 23, wherein the antisense strand contains at least one thermally destabilizing modification of the duplex located in the seed region of the antisense strand (i.e., at position 2-9 of the 5′-end of the antisense strand), and wherein the dsRNA optionally further has at least one (e.g., one, two, three, four, five, six or all seven) of the following characteristics: (i) the antisense comprises 2, 3, 4, 5 or 6 2′-fluoro modifications; (ii) the sense strand is conjugated with a ligand; (iii) the sense strand comprises 2, 3, 4 or 5 2′-fluoro modifications; (iv) the sense strand comprises 3, 4 or 5 phosphorothioate internucleotide linkages; (v) the dsRNA comprises at least four 2′-fluoro modifications; (vi) the dsRNA comprises a duplex region of 12-40 nucleotide pairs in length; and (vii) the dsRNA has a blunt end at 5′-end of the antisense strand.

[0693] In some embodiments, the dsRNA molecule of the disclosure comprises mismatch(es) with the target, within the duplex, or combinations thereof. The mismatch can occur in the overhang region or the duplex region. The base pair can be ranked on the basis of their propensity to promote dissociation or melting (e.g., on the free energy of association or dissociation of a particular pairing, the simplest approach is to examine the pairs on an individual pair basis, though next neighbor or similar analysis can also be used). In terms of promoting dissociation: A:U is preferred over G:C; G:U is preferred over G:C; and J:C is preferred over G:C (I=inosine). Mismatches, e.g., non-canonical or other than canonical pairings (as described elsewhere herein) are preferred over canonical (A:T, A:U, G:C) pairings; and pairings which include a universal base are preferred over canonical pairings.

[0694] In some embodiments, the dsRNA molecule of the disclosure comprises at least one of the first 1, 2, 3, 4, or 5 base pairs within the duplex regions from the 5′-end of the antisense strand can be chosen independently from the group of: A:U, G:U, I:C, and mismatched pairs, e.g., non-canonical or other than canonical pairings or pairings which include a universal base, to promote the dissociation of the antisense strand at the 5′-end of the duplex.

[0695] In some embodiments, the nucleotide at the 1 position within the duplex region from the 5′-end in the antisense strand is selected from the group consisting of A, dA, dU, U, and dT. Alternatively, at least one of the first 1, 2 or 3 base pair within the duplex region from the 5′-end of the antisense strand is an AU base pair. For example, the first base pair within the duplex region from the 5′-end of the antisense strand is an AU base pair.

[0696] It was found that introducing 4′-modified or 5′-modified nucleotide to the 3′-end of a phosphodiester (PO), phosphorothioate (PS), or phosphorodithioate (PS2) linkage of a nucleotide at any position of single stranded or double stranded oligonucleotide can exert steric effect to the internucleotide linkage and, hence, protecting or stabilizing it against nucleases.

[0697] In some embodiments, 5′-modified nucleotide is introduced at the 3′-end of a dinucleotide at any position of single stranded or double stranded siRNA. For instance, a 5′-alkylated nucleoside may be introduced at the 3′-end of a dinucleotide at any position of single stranded or double stranded siRNA. The alkyl group at the 5′ position of the ribose sugar can be racemic or chirally pure R or S isomer. An exemplary 5′-alkylated nucleoside is 5′-methyl nucleoside. The 5′-methyl can be either racemic or chirally pure R or S isomer.

[0698] In some embodiments, 4′-modified nucleoside is introduced at the 3′-end of a dinucleotide at any position of single stranded or double stranded siRNA. For instance, a 4′-alkylated nucleoside may be introduced at the 3′-end of a dinucleotide at any position of single stranded or double stranded siRNA. The alkyl group at the 4′ position of the ribose sugar can be racemic or chirally pure R or S isomer. An exemplary 4′-alkylated nucleoside is 4′-methyl nucleoside. The 4′-methyl can be either racemic or chirally pure R or S isomer. Alternatively, a 4′-O-alkylated nucleoside may be introduced at the 3′-end of a dinucleotide at any position of single stranded or double stranded siRNA. The 4′-O-alkyl of the ribose sugar can be racemic or chirally pure R or S isomer. An exemplary 4′-O-alkylated nucleoside is 4′-O-methyl nucleoside. The 4′-O-methyl can be either racemic or chirally pure R or S isomer.

[0699] In some embodiments, 5′-alkylated nucleoside is introduced at any position on the sense strand or antisense strand of a dsRNA, and such modification maintains or improves potency of the dsRNA. The 5′-alkyl can be either racemic or chirally pure R or S isomer. An exemplary 5′-alkylated nucleoside is 5′-methyl nucleoside. The 5′-methyl can be either racemic or chirally pure R or S isomer.

[0700] In some embodiments, 4′-alkylated nucleoside is introduced at any position on the sense strand or antisense strand of a dsRNA, and such modification maintains or improves potency of the dsRNA. The 4′-alkyl can be either racemic or chirally pure R or S isomer. An exemplary 4′-alkylated nucleoside is 4′-methyl nucleoside. The 4′-methyl can be either racemic or chirally pure R or S isomer.

[0701] In some embodiments, 4′-O-alkylated nucleoside is introduced at any position on the sense strand or antisense strand of a dsRNA, and such modification maintains or improves potency of the dsRNA. The 5′-alkyl can be either racemic or chirally pure R or S isomer. An exemplary 4′-O-alkylated nucleoside is 4′-O-methyl nucleoside. The 4′-O-methyl can be either racemic or chirally pure R or S isomer.

[0702] In some embodiments, the dsRNA molecule of the disclosure can comprise 2′-5′ linkages (with 2′-H, 2′-OH and 2′-OMe and with P═O or P═S). For example, the 2′-5′ linkages modifications can be used to promote nuclease resistance or to inhibit binding of the sense to the antisense strand, or can be used at the 5′ end of the sense strand to avoid sense strand activation by RISC.

[0703] In another embodiment, the dsRNA molecule of the disclosure can comprise L sugars (e.g., L ribose, L-arabinose with 2′-H, 2′-OH and 2′-OMe). For example, these L sugars modifications can be used to promote nuclease resistance or to inhibit binding of the sense to the antisense strand, or can be used at the 5′ end of the sense strand to avoid sense strand activation by RISC.

[0704] Various publications describe multimeric siRNA which can all be used with the dsRNA of the disclosure. Such publications include WO2007/091269, U.S. Pat. No. 7,858,769, WO2010/141511, WO2007/117686, WO2009/014887, and WO2011/031520 which are hereby incorporated by their entirely.

[0705] As described in more detail below, the RNAi agent that contains conjugations of one or more carbohydrate moieties to an RNAi agent can optimize one or more properties of the RNAi agent. In many cases, the carbohydrate moiety will be attached to a modified subunit of the RNAi agent. For example, the ribose sugar of one or more ribonucleotide subunits of a dsRNA agent can be replaced with another moiety, e.g., a non-carbohydrate (preferably cyclic) carrier to which is attached a carbohydrate ligand. A ribonucleotide subunit in which the ribose sugar of the subunit has been so replaced is referred to herein as a ribose replacement modification subunit (RRMS). A cyclic carrier may be a carbocyclic ring system, i.e., all ring atoms are carbon atoms, or a heterocyclic ring system, i.e., one or more ring atoms may be a heteroatom, e.g., nitrogen, oxygen, sulfur. The cyclic carrier may be a monocyclic ring system, or may contain two or more rings, e.g. fused rings. The cyclic carrier may be a fully saturated ring system, or it may contain one or more double bonds.

[0706] The ligand may be attached to the polynucleotide via a carrier. The carriers include (i) at least one “backbone attachment point,” preferably two “backbone attachment points” and (ii) at least one “tethering attachment point.” A “backbone attachment point” as used herein refers to a functional group, e.g. a hydroxyl group, or generally, a bond available for, and that is suitable for incorporation of the carrier into the backbone, e.g., the phosphate, or modified phosphate, e.g., sulfur containing, backbone, of a ribonucleic acid. A “tethering attachment point” (TAP) in some embodiments refers to a constituent ring atom of the cyclic carrier, e.g., a carbon atom or a heteroatom (distinct from an atom which provides a backbone attachment point), that connects a selected moiety. The moiety can be, e.g., a carbohydrate, e.g. monosaccharide, disaccharide, trisaccharide, tetrasaccharide, oligosaccharide and polysaccharide. Optionally, the selected moiety is connected by an intervening tether to the cyclic carrier. Thus, the cyclic carrier will often include a functional group, e.g., an amino group, or generally, provide a bond, that is suitable for incorporation or tethering of another chemical entity, e.g., a ligand to the constituent ring.

[0707] The RNAi agents may be conjugated to a ligand via a carrier, wherein the carrier can be cyclic group or acyclic group; preferably, the cyclic group is selected from pyrrolidinyl, pyrazolinyl, pyrazolidinyl, imidazolinyl, imidazolidinyl, piperidinyl, piperazinyl, [1,3]dioxolane, oxazolidinyl, isoxazolidinyl, morpholinyl, thiazolidinyl, isothiazolidinyl, quinoxalinyl, pyridazinonyl, tetrahydrofuryl and and decalin; preferably, the acyclic group is selected from serinol backbone or diethanolamine backbone.

[0708] In certain specific embodiments, the RNAi agent for use in the methods of the disclosure is an agent selected from the group of agents listed in any one of Tables 2-7, 12, 13, and 18-20. These agents may further comprise a ligand, such as one or more lipophilic moieties, one or more GalNAc derivatives, or both of one of more lipophilic moieties and one or more GalNAc derivatives.

### IV. iRNAs Conjugated to Ligands

[0709] Another modification of the RNA of an iRNA of the invention involves chemically linking to the iRNA one or more ligands, moieties or conjugates that enhance the activity, cellular distribution or cellular uptake of the iRNA, e.g., into a cell. Such moieties include but are not limited to lipid moieties such as a cholesterol moiety (Letsinger et al., Proc. Natl. Acid. Sci. USA, 1989, 86: 6553-6556), cholic acid (Manoharan et al., Biorg. Med. Chem. Let., 1994, 4:1053-1060), a thioether, e.g., beryl-S-tritylthiol (Manoharan et al., Ann. N.Y. Acad. Sci., 1992, 660:306-309; Manoharan et al., Biorg. Med. Chem. Let., 1993, 3:2765-2770), a thiocholesterol (Oberhauser et al., Nucl. Acids Res., 1992, 20:533-538), an aliphatic chain, e.g., dodecandiol or undecyl residues (Saison-Behmoaras et al., EMBO J, 1991, 10:1111-1118; Kabanov et al., FEBS Lett., 1990, 259:327-330; Svinarchuk et al., Biochimie, 1993, 75:49-54), a phospholipid, e.g., di-hexadecyl-rac-glycerol or triethyl-ammonium 1,2-di-O-hexadecyl-rac-glycero-3-phosphonate (Manoharan et al., Tetrahedron Lett., 1995, 36:3651-3654; Shea et al., Nucl. Acids Res., 1990, 18:3777-3783), a polyamine or a polyethylene glycol chain (Manoharan et al., Nucleosides & Nucleotides, 1995, 14:969-973), or adamantane acetic acid (Manoharan et al., Tetrahedron Lett., 1995, 36:3651-3654), a palmityl moiety (Mishra et al., Biochim. Biophys. Acta, 1995, 1264:229-237), or an octadecylamine or hexylamino-carbonyloxycholesterol moiety (Crooke et al., J. Pharmacol. Exp. Ther., 1996, 277:923-937).

[0710] In certain embodiments, a ligand alters the distribution, targeting or lifetime of an iRNA agent into which it is incorporated. In some embodiments, a ligand provides an enhanced affinity for a selected target, e.g., molecule, cell or cell type, compartment, e.g., a cellular or organ compartment, tissue, organ or region of the body, as, e.g., compared to a species absent such a ligand. Typical ligands will not take part in duplex pairing in a duplexed nucleic acid.

[0711] Ligands can include a naturally occurring substance, such as a protein (e.g., human serum albumin (HSA), low-density lipoprotein (LDL), or globulin); carbohydrate (e.g., a dextran, pullulan, chitin, chitosan, inulin, cyclodextrin or hyaluronic acid); or a lipid. The ligand may also be a recombinant or synthetic molecule, such as a synthetic polymer, e.g., a synthetic polyamino acid. Examples of polyamino acids include polyamino acid is a polylysine (PLL), poly L-aspartic acid, poly L-glutamic acid, styrene-maleic acid anhydride copolymer, poly(L-lactide-co-glycolied) copolymer, divinyl ether-maleic anhydride copolymer, N-(2-hydroxypropyl)methacrylamide copolymer (HMPA), polyethylene glycol (PEG), polyvinyl alcohol (PVA), polyurethane, poly(2-ethylacryllic acid), N-isopropylacrylamide polymers, or polyphosphazine. Example of polyamines include: polyethylenimine, polylysine (PLL), spermine, spermidine, polyamine, pseudopeptide-polyamine, peptidomimetic polyamine, dendrimer polyamine, arginine, amidine, protamine, cationic lipid, cationic porphyrin, quaternary salt of a polyamine, or an a helical peptide.

[0712] Ligands can also include targeting groups, e.g., a cell or tissue targeting agent, e.g., a lectin, glycoprotein, lipid or protein, e.g., an antibody, that binds to a specified cell type such as a kidney cell. A targeting group can be a thyrotropin, melanotropin, lectin, glycoprotein, surfactant protein A, Mucin carbohydrate, multivalent lactose, multivalent galactose, N-acetyl-galactosamine, N-acetyl-glucosamine multivalent mannose, multivalent fucose, glycosylated polyaminoacids, multivalent galactose, transferrin, bisphosphonate, polyglutamate, polyaspartate, a lipid, cholesterol, a steroid, bile acid, folate, vitamin B12, biotin, or an RGD peptide or RGD peptide mimetic. In certain embodiments, the ligand is a multivalent galactose, e.g., an N-acetyl-galactosamine.

[0713] Other examples of ligands include dyes, intercalating agents (e.g. acridines), cross-linkers (e.g. psoralene, mitomycin C), porphyrins (TPPC4, texaphyrin, Sapphyrin), polycyclic aromatic hydrocarbons (e.g., phenazine, dihydrophenazine), artificial endonucleases (e.g. EDTA), lipophilic molecules, e.g., cholesterol, cholic acid, adamantane acetic acid, 1-pyrene butyric acid, dihydrotestosterone, 1,3-Bis-O(hexadecyl)glycerol, geranyloxyhexyl group, hexadecylglycerol, borneol, menthol, 1,3-propanediol, heptadecyl group, palmitic acid, myristic acid, O3-(oleoyl)lithocholic acid, O3-(oleoyl)cholenic acid, dimethoxytrityl, or phenoxazine) and peptide conjugates (e.g., antennapedia peptide, Tat peptide), alkylating agents, phosphate, amino, mercapto, PEG (e.g., PEG-40K), MPEG, [MPEG]₂, polyamino, alkyl, substituted alkyl, radiolabeled markers, enzymes, haptens (e.g. biotin), transport/absorption facilitators (e.g., aspirin, vitamin E, folic acid), synthetic ribonucleases (e.g., imidazole, bisimidazole, histamine, imidazole clusters, acridine-imidazole conjugates, Eu3+ complexes of tetraazamacrocycles), dinitrophenyl, HRP, or AP.

[0714] Ligands can be proteins, e.g., glycoproteins, or peptides, e.g., molecules having a specific affinity for a co-ligand, or antibodies e.g., an antibody, that binds to a specified cell type such as a cancer cell, endothelial cell, or bone cell. Ligands may also include hormones and hormone receptors. They can also include non-peptidic species, such as lipids, lectins, carbohydrates, vitamins, cofactors, multivalent lactose, multivalent galactose, N-acetyl-galactosamine, N-acetyl-glucosamine multivalent mannose, or multivalent fucose. The ligand can be, for example, a lipopolysaccharide, an activator of p38 MAP kinase, or an activator of NF-κB.

[0715] The ligand can be a substance, e.g., a drug, which can increase the uptake of the iRNA agent into the cell, for example, by disrupting the cell's cytoskeleton, e.g., by disrupting the cell's microtubules, microfilaments, or intermediate filaments. The drug can be, for example, taxon, vincristine, vinblastine, cytochalasin, nocodazole, japlakinolide, latrunculin A, phalloidin, swinholide A, indanocine, or myoservin.

[0716] In some embodiments, a ligand attached to an iRNA as described herein acts as a pharmacokinetic modulator (PK modulator). PK modulators include lipophiles, bile acids, steroids, phospholipid analogues, peptides, protein binding agents, PEG, vitamins etc. Exemplary PK modulators include, but are not limited to, cholesterol, fatty acids, cholic acid, lithocholic acid, dialkylglycerides, diacylglyceride, phospholipids, sphingolipids, naproxen, ibuprofen, vitamin E, biotin etc. Oligonucleotides that comprise a number of phosphorothioate linkages are also known to bind to serum protein, thus short oligonucleotides, e.g., oligonucleotides of about 5 bases, 10 bases, 15 bases or 20 bases, comprising multiple of phosphorothioate linkages in the backbone are also amenable to the present invention as ligands (e.g. as PK modulating ligands). In addition, aptamers that bind serum components (e.g. serum proteins) are also suitable for use as PK modulating ligands in the embodiments described herein.

[0717] Ligand-conjugated iRNAs of the invention may be synthesized by the use of an oligonucleotide that bears a pendant reactive functionality, such as that derived from the attachment of a linking molecule onto the oligonucleotide (described below). This reactive oligonucleotide may be reacted directly with commercially-available ligands, ligands that are synthesized bearing any of a variety of protecting groups, or ligands that have a linking moiety attached thereto.

[0718] The oligonucleotides used in the conjugates of the present invention may be conveniently and routinely made through the well-known technique of solid-phase synthesis. Equipment for such synthesis is sold by several vendors including, for example, Applied Biosystems® (Foster City, Calif.). Any other means for such synthesis known in the art may additionally or alternatively be employed. It is also known to use similar techniques to prepare other oligonucleotides, such as the phosphorothioates and alkylated derivatives.

[0719] In the ligand-conjugated oligonucleotides and ligand-molecule bearing sequence-specific linked nucleosides of the present invention, the oligonucleotides and oligonucleosides may be assembled on a suitable DNA synthesizer utilizing standard nucleotide or nucleoside precursors, or nucleotide or nucleoside conjugate precursors that already bear the linking moiety, ligand-nucleotide or nucleoside-conjugate precursors that already bear the ligand molecule, or non-nucleoside ligand-bearing building blocks.

[0720] When using nucleotide-conjugate precursors that already bear a linking moiety, the synthesis of the sequence-specific linked nucleosides is typically completed, and the ligand molecule is then reacted with the linking moiety to form the ligand-conjugated oligonucleotide. In some embodiments, the oligonucleotides or linked nucleosides of the present invention are synthesized by an automated synthesizer using phosphoramidites derived from ligand-nucleoside conjugates in addition to the standard phosphoramidites and non-standard phosphoramidites that are commercially available and routinely used in oligonucleotide synthesis.

[0721] A. Lipid Conjugates

[0722] In certain embodiments, the ligand or conjugate is a lipid or lipid-based molecule. Such a lipid or lipid-based molecule can typically bind a serum protein, such as human serum albumin (HSA). An HSA binding ligand allows for distribution of the conjugate to a target tissue, e.g., a non-kidney target tissue of the body. For example, the target tissue can be the liver, including parenchymal cells of the liver. Other molecules that can bind HSA can also be used as ligands. For example, naproxen or aspirin can be used. A lipid or lipid-based ligand can (a) increase resistance to degradation of the conjugate, (b) increase targeting or transport into a target cell or cell membrane, or (c) can be used to adjust binding to a serum protein, e.g., HSA.

[0723] A lipid-based ligand can be used to modulate, e.g., control (e.g., inhibit) the binding of the conjugate to a target tissue. For example, a lipid or lipid-based ligand that binds to HSA more strongly will be less likely to be targeted to the kidney and therefore less likely to be cleared from the body. A lipid or lipid-based ligand that binds to HSA less strongly can be used to target the conjugate to the kidney.

[0724] In certain embodiments, the lipid-based ligand binds HSA. For example, the ligand can bind HSA with a sufficient affinity such that distribution of the conjugate to a non-kidney tissue is enhanced. However, the affinity is typically not so strong that the HSA-ligand binding cannot be reversed.

[0725] In certain embodiments, the lipid-based ligand binds HSA weakly or not at all, such that distribution of the conjugate to the kidney is enhanced. Other moieties that target to kidney cells can also be used in place of or in addition to the lipid-based ligand.

[0726] In another aspect, the ligand is a moiety, e.g., a vitamin, which is taken up by a target cell, e.g., a proliferating cell. These are particularly useful for treating disorders characterized by unwanted cell proliferation, e.g., of the malignant or non-malignant type, e.g., cancer cells. Exemplary vitamins include vitamin A, E, and K. Other exemplary vitamins include are B vitamin, e.g., folic acid, B12, riboflavin, biotin, pyridoxal or other vitamins or nutrients taken up by cancer cells. Also included are HSA and low density lipoprotein (LDL).

[0727] B. Cell Permeation Agents

[0728] In another aspect, the ligand is a cell-permeation agent, such as a helical cell-permeation agent. In certain embodiments, the agent is amphipathic. An exemplary agent is a peptide such as tat or antennopedia. If the agent is a peptide, it can be modified, including a peptidylmimetic, invertomers, non-peptide or pseudo-peptide linkages, and use of D-amino acids. The helical agent is typically an α-helical agent and can have a lipophilic and a lipophobic phase.

[0729] The ligand can be a peptide or peptidomimetic. A peptidomimetic (also referred to herein as an oligopeptidomimetic) is a molecule capable of folding into a defined three-dimensional structure similar to a natural peptide. The attachment of peptide and peptidomimetics to iRNA agents can affect pharmacokinetic distribution of the iRNA, such as by enhancing cellular recognition and absorption. The peptide or peptidomimetic moiety can be about 5-50 amino acids long, e.g., about 5, 10, 15, 20, 25, 30, 35, 40, 45, or 50 amino acids long.

[0730] A peptide or peptidomimetic can be, for example, a cell permeation peptide, cationic peptide, amphipathic peptide, or hydrophobic peptide (e.g., consisting primarily of Tyr, Trp, or Phe). The peptide moiety can be a dendrimer peptide, constrained peptide or crosslinked peptide. In another alternative, the peptide moiety can include a hydrophobic membrane translocation sequence (MTS). An exemplary hydrophobic MTS-containing peptide is RFGF having the amino acid sequence AAVALLPAVLLALLAP (SEQ ID NO: 31). An RFGF analogue (e.g., amino acid sequence AALLPVLLAAP (SEQ ID NO: 32)) containing a hydrophobic MTS can also be a targeting moiety. The peptide moiety can be a “delivery” peptide, which can carry large polar molecules including peptides, oligonucleotides, and protein across cell membranes. For example, sequences from the HIV Tat protein (GRKKRRQRRRPPQ (SEQ ID NO: 33)) and the Drosophila Antennapedia protein (RQIKIWFQNRRMKWKK (SEQ ID NO: 34)) have been found to be capable of functioning as delivery peptides. A peptide or peptidomimetic can be encoded by a random sequence of DNA, such as a peptide identified from a phage-display library, or one-bead-one-compound (OBOC) combinatorial library (Lam et al., Nature, 354:82-84, 1991). Typically, the peptide or peptidomimetic tethered to a dsRNA agent via an incorporated monomer unit is a cell targeting peptide such as an arginine-glycine-aspartic acid (RGD)-peptide, or RGD mimic. A peptide moiety can range in length from about 5 amino acids to about 40 amino acids. The peptide moieties can have a structural modification, such as to increase stability or direct conformational properties. Any of the structural modifications described below can be utilized.

[0731] An RGD peptide for use in the compositions and methods of the invention may be linear or cyclic, and may be modified, e.g., glycosylated or methylated, to facilitate targeting to a specific tissue(s). RGD-containing peptides and peptidiomimemtics may include D-amino acids, as well as synthetic RGD mimics. In addition to RGD, one can use other moieties that target the integrin ligand. Preferred conjugates of this ligand target PECAM-1 or VEGF.

[0732] An RGD peptide moiety can be used to target a particular cell type, e.g., a tumor cell, such as an endothelial tumor cell or a breast cancer tumor cell (Zitzmann et al., Cancer Res., 62:5139-43, 2002). An RGD peptide can facilitate targeting of an dsRNA agent to tumors of a variety of other tissues, including the lung, kidney, spleen, or liver (Aoki et al., Cancer Gene Therapy 8:783-787, 2001). Typically, the RGD peptide will facilitate targeting of an iRNA agent to the kidney. The RGD peptide can be linear or cyclic, and can be modified, e.g., glycosylated or methylated to facilitate targeting to specific tissues. For example, a glycosylated RGD peptide can deliver an iRNA agent to a tumor cell expressing αᵥβ₃ (Haubner et al., Jour. Nucl. Med., 42:326-336, 2001).

[0733] A “cell permeation peptide” is capable of permeating a cell, e.g., a microbial cell, such as a bacterial or fungal cell, or a mammalian cell, such as a human cell. A microbial cell-permeating peptide can be, for example, an α-helical linear peptide (e.g., LL-37 or Ceropin P1), a disulfide bond-containing peptide (e.g., α-defensin, β-defensin or bactenecin), or a peptide containing only one or two dominating amino acids (e.g., PR-39 or indolicidin). A cell permeation peptide can also include a nuclear localization signal (NLS). For example, a cell permeation peptide can be a bipartite amphipathic peptide, such as MPG, which is derived from the fusion peptide domain of HIV-1 gp41 and the NLS of SV40 large T antigen (Simeoni et al., Nucl. Acids Res. 31:2717-2724, 2003).

[0734] C. Carbohydrate Conjugates

[0735] In some embodiments of the compositions and methods of the invention, an iRNA further comprises a carbohydrate. The carbohydrate conjugated iRNA are advantageous for the in vivo delivery of nucleic acids, as well as compositions suitable for in vivo therapeutic use, as described herein. As used herein, “carbohydrate” refers to a compound which is either a carbohydrate per se made up of one or more monosaccharide units having at least 6 carbon atoms (which can be linear, branched or cyclic) with an oxygen, nitrogen or sulfur atom bonded to each carbon atom; or a compound having as a part thereof a carbohydrate moiety made up of one or more monosaccharide units each having at least six carbon atoms (which can be linear, branched or cyclic), with an oxygen, nitrogen or sulfur atom bonded to each carbon atom. Representative carbohydrates include the sugars (mono-, di-, tri- and oligosaccharides containing from about 4, 5, 6, 7, 8, or 9 monosaccharide units), and polysaccharides such as starches, glycogen, cellulose and polysaccharide gums. Specific monosaccharides include C5 and above (e.g., C5, C6, C7, or C8) sugars; di- and tri-saccharides include sugars having two or three monosaccharide units (e.g., C5, C6, C7, or C8).

[0736] In certain embodiments, a carbohydrate conjugate comprises a monosaccharide.

[0737] In certain embodiments, the monosaccharide is an N-acetylgalactosamine (GalNAc). GalNAc conjugates, which comprise one or more N-acetylgalactosamine (GalNAc) derivatives, are described, for example, in U.S. Pat. No. 8,106,022, the entire content of which is hereby incorporated herein by reference. In some embodiments, the GalNAc conjugate serves as a ligand that targets the iRNA to particular cells. In some embodiments, the GalNAc conjugate targets the iRNA to liver cells, e.g., by serving as a ligand for the asialoglycoprotein receptor of liver cells (e.g., hepatocytes).

[0738] In some embodiments, the carbohydrate conjugate comprises one or more GalNAc derivatives. The GalNAc derivatives may be attached via a linker, e.g., a bivalent or trivalent branched linker. In some embodiments the GalNAc conjugate is conjugated to the 3′ end of the sense strand. In some embodiments, the GalNAc conjugate is conjugated to the iRNA agent (e.g., to the 3′ end of the sense strand) via a linker, e.g., a linker as described herein. In some embodiments the GalNAc conjugate is conjugated to the 5′ end of the sense strand. In some embodiments, the GalNAc conjugate is conjugated to the iRNA agent (e.g., to the 5′ end of the sense strand) via a linker, e.g., a linker as described herein.

[0739] In certain embodiments of the invention, the GalNAc or GalNAc derivative is attached to an iRNA agent of the invention via a monovalent linker. In some embodiments, the GalNAc or GalNAc derivative is attached to an iRNA agent of the invention via a bivalent linker. In yet other embodiments of the invention, the GalNAc or GalNAc derivative is attached to an iRNA agent of the invention via a trivalent linker. In other embodiments of the invention, the GalNAc or GalNAc derivative is attached to an iRNA agent of the invention via a tetravalent linker.

[0740] In certain embodiments, the double stranded RNAi agents of the invention comprise one GalNAc or GalNAc derivative attached to the iRNA agent. In certain embodiments, the double stranded RNAi agents of the invention comprise a plurality (e.g., 2, 3, 4, 5, or 6) of GalNAc or GalNAc derivatives, each independently attached to a plurality of nucleotides of the double stranded RNAi agent through a plurality of monovalent linkers.

[0741] In some embodiments, for example, when the two strands of an iRNA agent of the invention are part of one larger molecule connected by an uninterrupted chain of nucleotides between the 3′-end of one strand and the 5′-end of the respective other strand forming a hairpin loop comprising, a plurality of unpaired nucleotides, each unpaired nucleotide within the hairpin loop may independently comprise a GalNAc or GalNAc derivative attached via a monovalent linker. The hairpin loop may also be formed by an extended overhang in one strand of the duplex.

[0742] In some embodiments, for example, when the two strands of an iRNA agent of the invention are part of one larger molecule connected by an uninterrupted chain of nucleotides between the 3′-end of one strand and the 5′-end of the respective other strand forming a hairpin loop comprising, a plurality of unpaired nucleotides, each unpaired nucleotide within the hairpin loop may independently comprise a GalNAc or GalNAc derivative attached via a monovalent linker. The hairpin loop may also be formed by an extended overhang in one strand of the duplex.

[0743] In some embodiments, the GalNAc conjugate is

[chemical structure]

[0744] In some embodiments, the RNAi agent is attached to the carbohydrate conjugate via a linker as shown in the following schematic, wherein X is O or S

[chemical structure]

[0745] In some embodiments, the RNAi agent is conjugated to L96 as defined in Table 1 and shown below:

[chemical structure]

[0746] In certain embodiments, a carbohydrate conjugate for use in the compositions and methods of the invention is selected from the group consisting of:

[chemical structure]

[chemical structure]

[chemical structure]

[chemical structure]

[chemical structure]

[chemical structure]

[chemical structure]

[0747] In certain embodiments, a carbohydrate conjugate for use in the compositions and methods of the invention is a monosaccharide. In certain embodiments, the monosaccharide is an N-acetylgalactosamine, such as

[chemical structure]

[0748] Another representative carbohydrate conjugate for use in the embodiments described herein includes, but is not limited to,

[chemical structure]

[0749] when one of X or Y is an oligonucleotide, the other is a hydrogen.

[0750] In some embodiments, a suitable ligand is a ligand disclosed in WO 2019/055633, the entire contents of which are incorporated herein by reference. In one embodiment the ligand comprises the structure below:

[chemical structure]

[0751] In certain embodiments, the RNAi agents of the disclosure may include GalNAc ligands, even if such GalNAc ligands are currently projected to be of limited value for the preferred intrathecal/intracerebroventricular/CNS delivery route(s) of the instant disclosure.

[0752] In certain embodiments of the invention, the GalNAc or GalNAc derivative is attached to an iRNA agent of the invention via a monovalent linker. In some embodiments, the GalNAc or GalNAc derivative is attached to an iRNA agent of the invention via a bivalent linker. In yet other embodiments of the invention, the GalNAc or GalNAc derivative is attached to an iRNA agent of the invention via a trivalent linker. In other embodiments of the invention, the GalNAc or GalNAc derivative is attached to an iRNA agent of the invention via a tetravalent linker.

[0753] In certain embodiments, the double stranded RNAi agents of the invention comprise one GalNAc or GalNAc derivative attached to the iRNA agent, e.g., the 5′end of the sense strand of a dsRNA agent, or the 5′ end of one or both sense strands of a dual targeting RNAi agent as described herein. In certain embodiments, the double stranded RNAi agents of the invention comprise a plurality (e.g., 2, 3, 4, 5, or 6) GalNAc or GalNAc derivatives, each independently attached to a plurality of nucleotides of the double stranded RNAi agent through a plurality of monovalent linkers.

[0754] In some embodiments, for example, when the two strands of an iRNA agent of the invention are part of one larger molecule connected by an uninterrupted chain of nucleotides between the 3′-end of one strand and the 5′-end of the respective other strand forming a hairpin loop comprising, a plurality of unpaired nucleotides, each unpaired nucleotide within the hairpin loop may independently comprise a GalNAc or GalNAc derivative attached via a monovalent linker.

[0755] In some embodiments, the carbohydrate conjugate further comprises one or more additional ligands as described above, such as, but not limited to, a PK modulator or a cell permeation peptide.

[0756] Additional carbohydrate conjugates and linkers suitable for use in the present invention include those described in WO 2014/179620 and WO 2014/179627, the entire contents of each of which are incorporated herein by reference.

[0757] D. Linkers

[0758] In some embodiments, the conjugate or ligand described herein can be attached to an iRNA oligonucleotide with various linkers that can be cleavable or non-cleavable.

[0759] The term “linker” or “linking group” means an organic moiety that connects two parts of a compound, e.g., covalently attaches two parts of a compound. Linkers typically comprise a direct bond or an atom such as oxygen or sulfur, a unit such as NR8, C(O), C(O)NH, SO, SO₂, SO₂NH or a chain of atoms, such as, but not limited to, substituted or unsubstituted alkyl, substituted or unsubstituted alkenyl, substituted or unsubstituted alkynyl, arylalkyl, arylalkenyl, arylalkynyl, heteroarylalkyl, heteroarylalkenyl, heteroarylalkynyl, heterocyclylalkyl, heterocyclylalkenyl, heterocyclylalkynyl, aryl, heteroaryl, heterocyclyl, cycloalkyl, cycloalkenyl, alkylarylalkyl, alkylarylalkenyl, alkylarylalkynyl, alkenylarylalkyl, alkenylarylalkenyl, alkenylarylalkynyl, alkynylarylalkyl, alkynylarylalkenyl, alkynylarylalkynyl, alkylheteroarylalkyl, alkylheteroarylalkenyl, alkylheteroarylalkynyl, alkenylheteroarylalkyl, alkenylheteroarylalkenyl, alkenylheteroarylalkynyl, alkynylheteroarylalkyl, alkynylheteroarylalkenyl, alkynylheteroarylalkynyl, alkylheterocyclylalkyl, alkylheterocyclylalkenyl, alkylhererocyclylalkynyl, alkenylheterocyclylalkyl, alkenylheterocyclylalkenyl, alkenylheterocyclylalkynyl, alkynylheterocyclylalkyl, alkynylheterocyclylalkenyl, alkynylheterocyclylalkynyl, alkylaryl, alkenylaryl, alkynylaryl, alkylheteroaryl, alkenylheteroaryl, alkynylhereroaryl, which one or more methylenes can be interrupted or terminated by 0, S, S(O), SO₂, N(R8), C(O), substituted or unsubstituted aryl, substituted or unsubstituted heteroaryl, substituted or unsubstituted heterocyclic; where R8 is hydrogen, acyl, aliphatic or substituted aliphatic. In certain embodiments, the linker is between about 1-24 atoms, 2-24, 3-24, 4-24, 5-24, 6-24, 6-18, 7-18, 8-18 atoms, 7-17, 8-17, 6-16, 7-16, or 8-16 atoms.

[0760] A cleavable linking group is one which is sufficiently stable outside the cell, but which upon entry into a target cell is cleaved to release the two parts the linker is holding together. In a preferred embodiment, the cleavable linking group is cleaved at least about 10 times, 20, times, 30 times, 40 times, 50 times, 60 times, 70 times, 80 times, 90 times or more, or at least about 100 times faster in a target cell or under a first reference condition (which can, e.g., be selected to mimic or represent intracellular conditions) than in the blood of a subject, or under a second reference condition (which can, e.g., be selected to mimic or represent conditions found in the blood or serum).

[0761] Cleavable linking groups are susceptible to cleavage agents, e.g., pH, redox potential or the presence of degradative molecules. Generally, cleavage agents are more prevalent or found at higher levels or activities inside cells than in serum or blood. Examples of such degradative agents include: redox agents which are selected for particular substrates or which have no substrate specificity, including, e.g., oxidative or reductive enzymes or reductive agents such as mercaptans, present in cells, that can degrade a redox cleavable linking group by reduction; esterases; endosomes or agents that can create an acidic environment, e.g., those that result in a pH of five or lower; enzymes that can hydrolyze or degrade an acid cleavable linking group by acting as a general acid, peptidases (which can be substrate specific), and phosphatases.

[0762] A cleavable linkage group, such as a disulfide bond can be susceptible to pH. The pH of human serum is 7.4, while the average intracellular pH is slightly lower, ranging from about 7.1-7.3. Endosomes have a more acidic pH, in the range of 5.5-6.0, and lysosomes have an even more acidic pH at around 5.0. Some linkers will have a cleavable linking group that is cleaved at a preferred pH, thereby releasing a cationic lipid from the ligand inside the cell, or into the desired compartment of the cell.

[0763] A linker can include a cleavable linking group that is cleavable by a particular enzyme. The type of cleavable linking group incorporated into a linker can depend on the cell to be targeted. For example, a liver-targeting ligand can be linked to a cationic lipid through a linker that includes an ester group. Liver cells are rich in esterases, and therefore the linker will be cleaved more efficiently in liver cells than in cell types that are not esterase-rich. Other cell-types rich in esterases include cells of the lung, renal cortex, and testis.

[0764] Linkers that contain peptide bonds can be used when targeting cell types rich in peptidases, such as liver cells and synoviocytes.

[0765] In general, the suitability of a candidate cleavable linking group can be evaluated by testing the ability of a degradative agent (or condition) to cleave the candidate linking group. It will also be desirable to also test the candidate cleavable linking group for the ability to resist cleavage in the blood or when in contact with other non-target tissue. Thus, one can determine the relative susceptibility to cleavage between a first and a second condition, where the first is selected to be indicative of cleavage in a target cell and the second is selected to be indicative of cleavage in other tissues or biological fluids, e.g., blood or serum. The evaluations can be carried out in cell free systems, in cells, in cell culture, in organ or tissue culture, or in whole animals. It can be useful to make initial evaluations in cell-free or culture conditions and to confirm by further evaluations in whole animals. In preferred embodiments, useful candidate compounds are cleaved at least about 2, 4, 10, 20, 30, 40, 50, 60, 70, 80, 90, or about 100 times faster in the cell (or under in vitro conditions selected to mimic intracellular conditions) as compared to blood or serum (or under in vitro conditions selected to mimic extracellular conditions).

[0766] i. Redox Cleavable Linking Groups

[0767] In certain embodiments, a cleavable linking group is a redox cleavable linking group that is cleaved upon reduction or oxidation. An example of reductively cleavable linking group is a disulphide linking group (—S—S—). To determine if a candidate cleavable linking group is a suitable “reductively cleavable linking group,” or for example is suitable for use with a particular iRNA moiety and particular targeting agent one can look to methods described herein. For example, a candidate can be evaluated by incubation with dithiothreitol (DTT), or other reducing agent using reagents know in the art, which mimic the rate of cleavage which would be observed in a cell, e.g., a target cell. The candidates can also be evaluated under conditions which are selected to mimic blood or serum conditions. In one, candidate compounds are cleaved by at most about 10% in the blood. In other embodiments, useful candidate compounds are degraded at least about 2, 4, 10, 20, 30, 40, 50, 60, 70, 80, 90, or about 100 times faster in the cell (or under in vitro conditions selected to mimic intracellular conditions) as compared to blood (or under in vitro conditions selected to mimic extracellular conditions). The rate of cleavage of candidate compounds can be determined using standard enzyme kinetics assays under conditions chosen to mimic intracellular media and compared to conditions chosen to mimic extracellular media.

[0768] ii. Phosphate-Based Cleavable Linking Groups

[0769] In certain embodiments, a cleavable linker comprises a phosphate-based cleavable linking group. A phosphate-based cleavable linking group is cleaved by agents that degrade or hydrolyze the phosphate group. An example of an agent that cleaves phosphate groups in cells are enzymes such as phosphatases in cells. Examples of phosphate-based linking groups are —O—P(O)(ORk)-O—, —O—P(S)(ORk)-O—, —O—P(S)(SRk)-O—, —S—P(O)(ORk)-O—, —O—P(O)(ORk)-S—, —S—P(O)(ORk)-S—, —O—P(S)(ORk)-S—, —S—P(S)(ORk)-O—, —O—P(O)(Rk)-O—, —O—P(S)(Rk)-O—, —S—P(O)(Rk)-O—, —S—P(S)(Rk)-O—, —S—P(O)(Rk)-S—, —O—P(S)(Rk)-S—, wherein Rk at each occurrence can be, independently, C1-C20 alkyl, C1-C20 haloalkyl, C6-C10 aryl, or C7-C12 aralkyl. Exemplary embodiments include —O—P(O)(OH)—O—, —O—P(S)(OH)—O—, —O—P(S)(SH)—O—, —S—P(O)(OH)—O—, —O—P(O)(OH)—S—, —S—P(O)(OH)—S—, —O—P(S)(OH)—S—, —S—P(S)(OH)—O—, —O—P(O)(H)—O—, —O—P(S)(H)—O—, —S—P(O)(H)—O, —S—P(S)(H)—O—, —S—P(O)(H)—S—, and —O—P(S)(H)—S—. In certain embodiments a phosphate-based linking group is —O—P(O)(OH)—O—. These candidates can be evaluated using methods analogous to those described above.

[0770] iii. Acid Cleavable Linking Groups

[0771] In certain embodiments, a cleavable linker comprises an acid cleavable linking group. An acid cleavable linking group is a linking group that is cleaved under acidic conditions. In preferred embodiments acid cleavable linking groups are cleaved in an acidic environment with a pH of about 6.5 or lower (e.g., about 6.0, 5.75, 5.5, 5.25, 5.0, or lower), or by agents such as enzymes that can act as a general acid. In a cell, specific low pH organelles, such as endosomes and lysosomes can provide a cleaving environment for acid cleavable linking groups. Examples of acid cleavable linking groups include but are not limited to hydrazones, esters, and esters of amino acids. Acid cleavable groups can have the general formula —C═NN—, C(O)O, or —OC(O). A preferred embodiment is when the carbon attached to the oxygen of the ester (the alkoxy group) is an aryl group, substituted alkyl group, or tertiary alkyl group such as dimethyl pentyl or t-butyl. These candidates can be evaluated using methods analogous to those described above.

[0772] iv. Ester-Based Cleavable Linking Groups

[0773] In certain embodiments, a cleavable linker comprises an ester-based cleavable linking group. An ester-based cleavable linking group is cleaved by enzymes such as esterases and amidases in cells. Examples of ester-based cleavable linking groups include but are not limited to esters of alkylene, alkenylene and alkynylene groups. Ester cleavable linking groups have the general formula —C(O)O—, or —OC(O)—. These candidates can be evaluated using methods analogous to those described above.

[0774] v. Peptide-Based Cleavable Linking Groups

[0775] In yet another embodiment, a cleavable linker comprises a peptide-based cleavable linking group. A peptide-based cleavable linking group is cleaved by enzymes such as peptidases and proteases in cells. Peptide-based cleavable linking groups are peptide bonds formed between amino acids to yield oligopeptides (e.g., dipeptides, tripeptides etc.) and polypeptides. Peptide-based cleavable groups do not include the amide group (—C(O)NH—). The amide group can be formed between any alkylene, alkenylene or alkynelene. A peptide bond is a special type of amide bond formed between amino acids to yield peptides and proteins. The peptide based cleavage group is generally limited to the peptide bond (i.e., the amide bond) formed between amino acids yielding peptides and proteins and does not include the entire amide functional group. Peptide-based cleavable linking groups have the general formula —NHCHR^{A}C(O)NHCHR^{B}C(O)—, where R^{A} and R^{B} are the R groups of the two adjacent amino acids. These candidates can be evaluated using methods analogous to those described above.

[0776] In some embodiments, an iRNA of the invention is conjugated to a carbohydrate through a linker. Non-limiting examples of iRNA carbohydrate conjugates with linkers of the compositions and methods of the invention include, but are not limited to,

[chemical structure]

[chemical structure]

[chemical structure]

when one of X or Y is an oligonucleotide, the other is a hydrogen.

[0777] In certain embodiments of the compositions and methods of the invention, a ligand is one or more “GalNAC” (N-acetylgalactosamine) derivatives attached through a bivalent or trivalent branched linker.

[0778] In certain embodiments, a dsRNA of the invention is conjugated to a bivalent or trivalent branched linker selected from the group of structures shown in any of formula (XLV)-(XLVI):

[chemical structure]

[0779] wherein:
[0780] q2A, q2B, q3A, q3B, q4A, q4B, q5A, q5B and q5C represent independently for each occurrence 0-20 and wherein the repeating unit can be the same or different;
[0781] P^{2A}, P^{2B}, P^{3A}, P^{3B}, P^{4A}, P^{4B}, P^{5A}, P^{5B}, P^{5C}, T^{2A}, T^{2B}, T^{3A}, T^{3B}, T^{4A}, T^{4B}, T^{4A}, T^{5B}, T^{5C} are each independently for each occurrence absent, CO, NH, O, S, OC(O), NHC(O), CH₂, CH₂NH or CH₂O;
[0782] Q^{2A}, Q^{2B}, Q^{3A}, Q^{3B}, Q^{4A}, Q^{4B}, Q^{5A}, Q^{5B}, Q^{5C} are independently for each occurrence absent, alkylene, substituted alkylene wherein one or more methylenes can be interrupted or terminated by one or more of O, S, S(O), SO₂, N(R^{N}), C(R′)═C(R″), C≡C or C(O);
[0783] R^{2A}, R^{2B}, R^{3A}, R^{3A}, R^{4A}, R^{4B}, R^{5A}, R^{5B}, R^{5C} are each independently for each occurrence absent, NH, O, S, CH₂, C(O)O, C(O)NH, NHCH(R^{a})C(O), —C(O)—CH(R^{a})—NH—, CO, CH—N—O,

[chemical structure]

or heterocyclyl;
[0784] L^{2A}, L^{2B}, L^{3A}, L^{3B}, L^{4A}, L^{4B} L^{5A}, L^{5B} and L^{5C} represent the ligand; i.e. each independently for each occurrence a monosaccharide (such as GalNAc), disaccharide, trisaccharide, tetrasaccharide, oligosaccharide, or polysaccharide; and R^{a} is H or amino acid side chain. Trivalent conjugating GalNAc derivatives are particularly useful for use with RNAi agents for inhibiting the expression of a target gene, such as those of formula (XLIX):

[chemical structure]

[0785] wherein L^{5A}, L^{5B} and L^{5C} represent a monosaccharide, such as GalNAc derivative.

[0786] Examples of suitable bivalent and trivalent branched linker groups conjugating GalNAc derivatives include, but are not limited to, the structures recited above as formulas II, VII, XI, X, and XIII.

[0787] Representative U.S. patents that teach the preparation of RNA conjugates include, but are not limited to, U.S. Pat. Nos. 4,828,979; 4,948,882; 5,218,105; 5,525,465; 5,541,313; 5,545,730; 5,552,538; 5,578,717, 5,580,731; 5,591,584; 5,109,124; 5,118,802; 5,138,045; 5,414,077; 5,486,603; 5,512,439; 5,578,718; 5,608,046; 4,587,044; 4,605,735; 4,667,025; 4,762,779; 4,789,737; 4,824,941; 4,835,263; 4,876,335; 4,904,582; 4,958,013; 5,082,830; 5,112,963; 5,214,136; 5,082,830; 5,112,963; 5,214,136; 5,245,022; 5,254,469; 5,258,506; 5,262,536; 5,272,250; 5,292,873; 5,317,098; 5,371,241, 5,391,723; 5,416,203, 5,451,463; 5,510,475; 5,512,667; 5,514,785; 5,565,552; 5,567,810; 5,574,142; 5,585,481; 5,587,371; 5,595,726; 5,597,696; 5,599,923; 5,599,928; 5,688,941; 6,294,664; 6,320,017; 6,576,752; 6,783,931; 6,900,297; 7,037,646; and 8,106,022, the entire contents of each of which are hereby incorporated herein by reference.

[0788] It is not necessary for all positions in a given compound to be uniformly modified, and in fact more than one of the aforementioned modifications can be incorporated in a single compound or even at a single nucleoside within an iRNA. The present invention also includes iRNA compounds that are chimeric compounds.

[0789] “Chimeric” iRNA compounds or “chimeras,” in the context of this invention, are iRNA compounds, preferably dsRNA agents, that contain two or more chemically distinct regions, each made up of at least one monomer unit, i.e., a nucleotide in the case of a dsRNA compound. These iRNAs typically contain at least one region wherein the RNA is modified so as to confer upon the iRNA increased resistance to nuclease degradation, increased cellular uptake, or increased binding affinity for the target nucleic acid. An additional region of the iRNA can serve as a substrate for enzymes capable of cleaving RNA:DNA or RNA:RNA hybrids. By way of example, RNase H is a cellular endonuclease which cleaves the RNA strand of an RNA:DNA duplex. Activation of RNase H, therefore, results in cleavage of the RNA target, thereby greatly enhancing the efficiency of iRNA inhibition of gene expression. Consequently, comparable results can often be obtained with shorter iRNAs when chimeric dsRNAs are used, compared to phosphorothioate deoxy dsRNAs hybridizing to the same target region. Cleavage of the RNA target can be routinely detected by gel electrophoresis and, if necessary, associated nucleic acid hybridization techniques known in the art.

[0790] In certain instances, the RNA of an iRNA can be modified by a non-ligand group. A number of non-ligand molecules have been conjugated to iRNAs in order to enhance the activity, cellular distribution or cellular uptake of the iRNA, and procedures for performing such conjugations are available in the scientific literature. Such non-ligand moieties have included lipid moieties, such as cholesterol (Kubo, T. et al., Biochem. Biophys. Res. Comm., 2007, 365(1):54-61; Letsinger et al., Proc. Natl. Acad. Sci. USA, 1989, 86:6553), cholic acid (Manoharan et al., Bioorg. Med. Chem. Lett., 1994, 4:1053), a thioether, e.g., hexyl-S-tritylthiol (Manoharan et al., Ann. N.Y. Acad. Sci., 1992, 660:306; Manoharan et al., Bioorg. Med. Chem. Let., 1993, 3:2765), a thiocholesterol (Oberhauser et al., Nucl. Acids Res., 1992, 20:533), an aliphatic chain, e.g., dodecandiol or undecyl residues (Saison-Behmoaras et al., EMBO J., 1991, 10:111; Kabanov et al., FEBS Lett., 1990, 259:327; Svinarchuk et al., Biochimie, 1993, 75:49), a phospholipid, e.g., di-hexadecyl-rac-glycerol or triethylammonium 1,2-di-O-hexadecyl-rac-glycero-3-H-phosphonate (Manoharan et al., Tetrahedron Lett., 1995, 36:3651; Shea et al., Nucl. Acids Res., 1990, 18:3777), a polyamine or a polyethylene glycol chain (Manoharan et al., Nucleosides & Nucleotides, 1995, 14:969), or adamantane acetic acid (Manoharan et al., Tetrahedron Lett., 1995, 36:3651), a palmityl moiety (Mishra et al., Biochim. Biophys. Acta, 1995, 1264:229), or an octadecylamine or hexylamino-carbonyl-oxycholesterol moiety (Crooke et al., J. Pharmacol. Exp. Ther., 1996, 277:923). Representative United States patents that teach the preparation of such RNA conjugates have been listed above. Typical conjugation protocols involve the synthesis of RNAs bearing an aminolinker at one or more positions of the sequence. The amino group is then reacted with the molecule being conjugated using appropriate coupling or activating reagents. The conjugation reaction can be performed either with the RNA still bound to the solid support or following cleavage of the RNA, in solution phase. Purification of the RNA conjugate by HPLC typically affords the pure conjugate.

### V. In Vivo Testing of SOD1 Knockdown

[0791] Mouse models of SOD1-associated neurodegenerative disease have been generated and can further be used to demonstrate the in vivo efficacy of the RNAi agents provided herein.

[0792] Such models may express, e.g., overexpress, for example, human superoxide dismutase 1 (SOD1), in some instances comprising an ALS-related mutation (e.g., a G93A, G37R, G86R, G85R, L84V, G127X, H46R, D90A, L126Z, A4V, or A4V/SOD1WT mutation) (see, e.g., Mina M, et al. (2018) J Transl Neurosci. 3:9). Additionally, such models may contain constituitive or inducible expression, e.g., overexpression, of, for example, human amyloid precursor protein (APP), in some instances comprising a pathogenic mutation (e.g., a Swedish mutation (KM670/671NL)), constituitive or inducible expression, e.g., overexpression, of, human presenilin 1 (PS1), in some instances comprising a pathogenic mutation (e.g., dE9 mutation) (see, e.g., Garcia-Alloza, M et al (2006) Neurobiol Dis 24(3): 516-24), and/or constituitive or inducible expression, e.g., overexpression, of 1N4R human tau protein, in some instances comprising a pathogenic mutation (e.g., a P301S mutation) (Wu, T et al (2019) Cell Rep 28(8): 2111-2123), superoxide dismutase 1 (SOD1) transgenic mice (see, e.g., Aziza (2018) In Vivo 32(983), mouse toxin models of Parkinson's disease (e.g., MPTP) and/or α-synuclein transgenic mice (Blesa and Przedborski (2014) Front Neurosci 8:155).

### VI. Delivery of an RNAi Agent of the Disclosure

[0793] The delivery of a RNAi agent of the disclosure to a cell e.g., a cell within a subject, such as a human subject (e.g., a subject in need thereof, such as a subject having a SOD1-associated neurodegenerative disorder, e.g., Amyotrophic Lateral Sclerosis (ALS), Alzheimer's disease (AD), Parkinson's disease (PD), and Down's syndrome (DS) can be achieved in a number of different ways. For example, delivery may be performed by contacting a cell with an RNAi agent of the disclosure either in vitro or in vivo. In vivo delivery may also be performed directly by administering a composition comprising an RNAi agent, e.g., a dsRNA, to a subject. Alternatively, in vivo delivery may be performed indirectly by administering one or more vectors that encode and direct the expression of the RNAi agent. These alternatives are discussed further below.

[0794] In general, any method of delivering a nucleic acid molecule (in vitro or in vivo) can be adapted for use with a RNAi agent of the disclosure (see e.g., Akhtar S. and Julian R L., (1992) Trends Cell. Biol. 2(5):139-144 and WO94/02595, which are incorporated herein by reference in their entireties). For in vivo delivery, factors to consider in order to deliver an RNAi agent include, for example, biological stability of the delivered agent, prevention of non-specific effects, and accumulation of the delivered agent in the target tissue. The non-specific effects of an RNAi agent can be minimized by local administration, for example, by direct injection or implantation into a tissue or topically administering the preparation. Local administration to a treatment site maximizes local concentration of the agent, limits the exposure of the agent to systemic tissues that can otherwise be harmed by the agent or that can degrade the agent, and permits a lower total dose of the RNAi agent to be administered. Several studies have shown successful knockdown of gene products when an RNAi agent is administered locally. For example, intraocular delivery of a VEGF dsRNA by intravitreal injection in cynomolgus monkeys (Tolentino, M J. et al., (2004) Retina 24:132-138) and subretinal injections in mice (Reich, S J. et al. (2003) Mol. Vis. 9:210-216) were both shown to prevent neovascularization in an experimental model of age-related macular degeneration. In addition, direct intratumoral injection of a dsRNA in mice reduces tumor volume (Pille, J. et al. (2005) Mol. Ther. 11:267-274) and can prolong survival of tumor-bearing mice (Kim, W J. et al., (2006) Mol. Ther. 14:343-350; Li, S. et al., (2007) Mol. Ther. 15:515-523). RNA interference has also shown success with local delivery to the CNS by direct injection (Dorn, G. et al., (2004) Nucleic Acids 32:e49; Tan, P H. et al. (2005) Gene Ther. 12:59-66; Makimura, H. et al. (2002) BMC Neurosci. 3:18; Shishkina, G T., et al. (2004) Neuroscience 129:521-528; Thakker, E R., et al. (2004) Proc. Natl. Acad. Sci. U.S.A. 101:17270-17275; Akaneya, Y., et al. (2005) J. Neurophysiol. 93:594-602) and to the lungs by intranasal administration (Howard, K A. et al., (2006) Mol. Ther. 14:476-484; Zhang, X. et al., (2004) J. Biol. Chem. 279:10677-10684; Bitko, V. et al., (2005) Nat. Med. 11:50-55). For administering a RNAi agent systemically for the treatment of a disease, the RNA can be modified or alternatively delivered using a drug delivery system; both methods act to prevent the rapid degradation of the dsRNA by endo- and exo-nucleases in vivo. Modification of the RNA or the pharmaceutical carrier can also permit targeting of the RNAi agent to the target tissue and avoid undesirable off-target effects (e.g., without wishing to be bound by theory, use of GNAs as described herein has been identified to destabilize the seed region of a dsRNA, resulting in enhanced preference of such dsRNAs for on-target effectiveness, relative to off-target effects, as such off-target effects are significantly weakened by such seed region destabilization). RNAi agents can be modified by chemical conjugation to lipophilic groups such as cholesterol to enhance cellular uptake and prevent degradation. For example, a RNAi agent directed against ApoB conjugated to a lipophilic cholesterol moiety was injected systemically into mice and resulted in knockdown of apoB mRNA in both the liver and jejunum (Soutschek, J. et al., (2004) Nature 432:173-178). Conjugation of an RNAi agent to an aptamer has been shown to inhibit tumor growth and mediate tumor regression in a mouse model of prostate cancer (McNamara, J O. et al., (2006) Nat. Biotechnol. 24:1005-1015). In an alternative embodiment, the RNAi agent can be delivered using drug delivery systems such as a nanoparticle, a dendrimer, a polymer, liposomes, or a cationic delivery system. Positively charged cationic delivery systems facilitate binding of molecule RNAi agent (negatively charged) and also enhance interactions at the negatively charged cell membrane to permit efficient uptake of an RNAi agent by the cell. Cationic lipids, dendrimers, or polymers can either be bound to an RNAi agent, or induced to form a vesicle or micelle (see e.g., Kim S H. et al., (2008) Journal of Controlled Release 129(2):107-116) that encases an RNAi agent. The formation of vesicles or micelles further prevents degradation of the RNAi agent when administered systemically. Methods for making and administering cationic-RNAi agent complexes are well within the abilities of one skilled in the art (see e.g., Sorensen, D R., et al. (2003) J. Mol. Biol 327:761-766; Verma, U N. et al., (2003) Clin. Cancer Res. 9:1291-1300; Arnold, A S et al. (2007) J. Hypertens. 25:197-205, which are incorporated herein by reference in their entirety). Some non-limiting examples of drug delivery systems useful for systemic delivery of RNAi agents include DOTAP (Sorensen, D R., et al (2003), supra; Verma, U N. et al., (2003), supra), Oligofectamine, “solid nucleic acid lipid particles” (Zimmermann, T S. et al., (2006) Nature 441:111-114), cardiolipin (Chien, P Y. et al., (2005) Cancer Gene Ther. 12:321-328; Pal, A. et al., (2005) Int J. Oncol. 26:1087-1091), polyethyleneimine (Bonnet M E. et al., (2008) Pharm. Res. August 16 Epub ahead of print; Aigner, A. (2006) J. Biomed. Biotechnol. 71659), Arg-Gly-Asp (RGD) peptides (Liu, S. (2006) Mol. Pharm. 3:472-487), and polyamidoamines (Tomalia, D A. et al., (2007) Biochem. Soc. Trans. 35:61-67; Yoo, H. et al., (1999) Pharm. Res. 16:1799-1804). In some embodiments, a RNAi agent forms a complex with cyclodextrin for systemic administration. Methods for administration and pharmaceutical compositions of RNAi agents and cyclodextrins can be found in U.S. Pat. No. 7,427,605, which is herein incorporated by reference in its entirety.

[0795] Certain aspects of the instant disclosure relate to a method of reducing the expression of a SOD1 target gene in a cell, comprising contacting said cell with the double-stranded RNAi agent of the disclosure. In one embodiment, the cell is a hepatic cell, optionally a hepatocyte. In one embodiment, the cell is an extrahepatic cell, optionally a CNS cell.

[0796] Another aspect of the disclosure relates to a method of reducing the expression of a SOD1 target gene in a subject, comprising administering to the subject the double-stranded RNAi agent of the disclosure.

[0797] Another aspect of the disclosure relates to a method of treating a subject having a SOD1-associated neurodegenerative disorder, comprising administering to the subject a therapeutically effective amount of the double-stranded RNAi agent of the disclosure, thereby treating the subject. Exemplary CNS disorders that can be treated by the method of the disclosure include Amyotrophic Lateral Sclerosis (ALS), Alzheimer's disease (AD), Parkinson's disease (PD), and Down's syndrome (DS).

[0798] In one embodiment, the double-stranded RNAi agent is administered subcutaneously.

[0799] In one embodiment, the double-stranded RNAi agent is administered by intraventricular administration.

[0800] In one embodiment, the double-stranded RNAi agent is administered intrathecally. In one embodiment, the double-stranded RNAi agent is administered intracerebroventricularly. By intrathecal or intracerebroventricular administration of the double-stranded RNAi agent, the method can reduce the expression of a SOD1 target gene in a brain (e.g., striatum) or spine tissue, for instance, cortex, cerebellum, cervical spine, lumbar spine, and thoracic spine.

[0801] For ease of exposition the formulations, compositions and methods in this section are discussed largely with regard to modified siRNA compounds. It may be understood, however, that these formulations, compositions and methods can be practiced with other siRNA compounds, e.g., unmodified siRNA compounds, and such practice is within the disclosure. A composition that includes a RNAi agent can be delivered to a subject by a variety of routes. Exemplary routes include intrathecal, subcutaneous, intravenous, intraventricular (also known as intracerebroventricular), intraperitoneal, intravitreal, topical, rectal, anal, vaginal, and ocular.

[0802] The RNAi agents of the disclosure can be incorporated into pharmaceutical compositions suitable for administration. Such compositions typically include one or more species of RNAi agent and a pharmaceutically acceptable carrier. As used herein the language “pharmaceutically acceptable carrier” is intended to include any and all solvents, dispersion media, coatings, antibacterial and antifungal agents, isotonic and absorption delaying agents, and the like, compatible with pharmaceutical administration. The use of such media and agents for pharmaceutically active substances is well known in the art. Except insofar as any conventional media or agent is incompatible with the active compound, use thereof in the compositions is contemplated. Supplementary active compounds can also be incorporated into the compositions.

[0803] The pharmaceutical compositions of the present disclosure may be administered in a number of ways depending upon whether local or systemic treatment is desired and upon the area to be treated. Administration may be topical (including ophthalmic, vaginal, rectal, transdermal), oral, or parenteral. Parenteral administration includes intravenous drip, subcutaneous, intraperitoneal, or intramuscular injection, or intrathecal or intraventricular administration.

[0804] The route and site of administration may be chosen to enhance targeting. For example, to target muscle cells, intramuscular injection into the muscles of interest would be a logical choice. Lung cells might be targeted by administering the RNAi agent in powder or aerosol form. The vascular endothelial cells could be targeted by coating a balloon catheter with the RNAi agent and mechanically introducing the RNA.

[0805] Formulations for topical administration may include transdermal patches, ointments, lotions, creams, gels, drops, suppositories, sprays, liquids, and powders. Conventional pharmaceutical carriers, aqueous, powder or oily bases, thickeners and the like may be necessary or desirable. Coated condoms, gloves, and the like may also be useful.

[0806] Compositions for oral administration include powders or granules, suspensions or solutions in water, syrups, elixirs or non-aqueous media, tablets, capsules, lozenges, or troches. In the case of tablets, carriers that can be used include lactose, sodium citrate and salts of phosphoric acid. Various disintegrants such as starch, and lubricating agents such as magnesium stearate, sodium lauryl sulfate and talc, are commonly used in tablets. For oral administration in capsule form, useful diluents are lactose and high molecular weight polyethylene glycols. When aqueous suspensions are required for oral use, the nucleic acid compositions can be combined with emulsifying and suspending agents. If desired, certain sweetening or flavoring agents can be added.

[0807] Compositions for intrathecal or intraventricular administration may include sterile aqueous solutions which may also contain buffers, diluents, and other suitable additives.

[0808] Formulations for parenteral administration may include sterile aqueous solutions which may also contain buffers, diluents, and other suitable additives. Intraventricular injection may be facilitated by an intraventricular catheter, for example, attached to a reservoir. For intravenous use, the total concentration of solutes may be controlled to render the preparation isotonic.

[0809] In one embodiment, the administration of the siRNA compound, e.g., a double-stranded siRNA compound, or ssiRNA compound, composition is parenteral, e.g., intravenous (e.g., as a bolus or as a diffusible infusion), intradermal, intraperitoneal, intramuscular, intrathecal, intraventricular, intracranial, subcutaneous, transmucosal, buccal, sublingual, endoscopic, rectal, oral, vaginal, topical, urethral, or ocular. Administration can be provided by the subject or by another person, e.g., a health care provider. The medication can be provided in measured doses or in a dispenser which delivers a metered dose. Selected modes of delivery are discussed in more detail below.

[0810] Intrathecal Administration.

[0811] In one embodiment, the double-stranded RNAi agent is delivered by intrathecal injection (i.e., injection into the spinal fluid which bathes the brain and spinal cord tissue). Intrathecal injection of RNAi agents into the spinal fluid can be performed as a bolus injection or via minipumps which can be implanted beneath the skin, providing a regular and constant delivery of siRNA into the spinal fluid. The circulation of the spinal fluid from the choroid plexus, where it is produced, down around the spinal cord and dorsal root ganglia and subsequently up past the cerebellum and over the cortex to the arachnoid granulations, where the fluid can exit the CNS, that, depending upon size, stability, and solubility of the compounds injected, molecules delivered intrathecally could hit targets throughout the entire CNS.

[0812] In some embodiments, the intrathecal administration is via a pump. The pump may be a surgically implanted osmotic pump. In one embodiment, the osmotic pump is implanted into the subarachnoid space of the spinal canal to facilitate intrathecal administration.

[0813] In some embodiments, the intrathecal administration is via an intrathecal delivery system for a pharmaceutical including a reservoir containing a volume of the pharmaceutical agent, and a pump configured to deliver a portion of the pharmaceutical agent contained in the reservoir. More details about this intrathecal delivery system may be found in WO 2015/116658, which is incorporated by reference in its entirety.

[0814] The amount of intrathecally injected RNAi agents may vary from one target gene to another target gene and the appropriate amount that has to be applied may have to be determined individually for each target gene. Typically, this amount ranges from 10 μg to 2 mg, preferably 50 μg to 1500 μg, more preferably 100 μg to 1000 μg.

[0815] Vector Encoded RNAi Agents of the Disclosure

[0816] RNAi agents targeting the SOD1 gene can be expressed from transcription units inserted into DNA or RNA vectors (see, e.g., Couture, A, et al., TIG. (1996), 12:5-10; WO 00/22113, WO 00/22114, and U.S. Pat. No. 6,054,299). Expression is preferably sustained (months or longer), depending upon the specific construct used and the target tissue or cell type. These transgenes can be introduced as a linear construct, a circular plasmid, or a viral vector, which can be an integrating or non-integrating vector. The transgene can also be constructed to permit it to be inherited as an extrachromosomal plasmid (Gassmann, et al., (1995) Proc. Natl. Acad. Sci. USA 92:1292).

[0817] The individual strand or strands of a RNAi agent can be transcribed from a promoter on an expression vector. Where two separate strands are to be expressed to generate, for example, a dsRNA, two separate expression vectors can be co-introduced (e.g., by transfection or infection) into a target cell. Alternatively, each individual strand of a dsRNA can be transcribed by promoters both of which are located on the same expression plasmid. In one embodiment, a dsRNA is expressed as inverted repeat polynucleotides joined by a linker polynucleotide sequence such that the dsRNA has a stem and loop structure.

[0818] RNAi agent expression vectors are generally DNA plasmids or viral vectors. Expression vectors compatible with eukaryotic cells, preferably those compatible with vertebrate cells, can be used to produce recombinant constructs for the expression of a RNAi agent as described herein. Delivery of RNAi agent expressing vectors can be systemic, such as by intravenous or intramuscular administration, by administration to target cells ex-planted from the patient followed by reintroduction into the patient, or by any other means that allows for introduction into a desired target cell.

[0819] Viral vector systems which can be utilized with the methods and compositions described herein include, but are not limited to, (a) adenovirus vectors; (b) retrovirus vectors, including but not limited to lentiviral vectors, moloney murine leukemia virus, etc.; (c) adeno-associated virus vectors; (d) herpes simplex virus vectors; (e) SV 40 vectors; (f) polyoma virus vectors; (g) papilloma virus vectors; (h) picornavirus vectors; (i) pox virus vectors such as an orthopox, e.g., vaccinia virus vectors or avipox, e.g. canary pox or fowl pox; and (j) a helper-dependent or gutless adenovirus. Replication-defective viruses can also be advantageous. Different vectors will or will not become incorporated into the cells' genome. The constructs can include viral sequences for transfection, if desired. Alternatively, the construct can be incorporated into vectors capable of episomal replication, e.g. EPV and EBV vectors. Constructs for the recombinant expression of a RNAi agent will generally require regulatory elements, e.g., promoters, enhancers, etc., to ensure the expression of the RNAi agent in target cells. Other aspects to consider for vectors and constructs are known in the art.

### VII. Pharmaceutical Compositions of the Invention

[0820] The present disclosure also includes pharmaceutical compositions and formulations which include the RNAi agents of the disclosure. In one embodiment, provided herein are pharmaceutical compositions containing an RNAi agent, as described herein, and a pharmaceutically acceptable carrier. The pharmaceutical compositions containing the RNAi agent are useful for treating a disease or disorder associated with the expression or activity of SOD1, e.g., a SOD1-associated neurodegenerative disease, such as Amyotrophic Lateral Sclerosis (ALS), Alzheimer's disease (AD), Parkinson's disease (PD), and Down's syndrome (DS).

[0821] Such pharmaceutical compositions are formulated based on the mode of delivery. One example is compositions that are formulated for systemic administration via parenteral delivery, e.g., by intravenous (IV), intramuscular (IM), or for subcutaneous (subQ) delivery. Another example is compositions that are formulated for direct delivery into the CNS, e.g., by intrathecal or intraventricular routes of injection, optionally by infusion into the brain (e.g., striatum), such as by continuous pump infusion.

[0822] In some embodiments, the pharmaceutical compositions of the invention are pyrogen free or non-pyrogenic.

[0823] The pharmaceutical compositions of the disclosure may be administered in dosages sufficient to inhibit expression of a SOD1 gene. In general, a suitable dose of an RNAi agent of the disclosure will be a flat dose in the range of about 0.001 to about 200.0 mg about once per month to about once per year, typically about once per quarter (i.e., about once every three months) to about once per year, generally a flat dose in the range of about 1 to 50 mg about once per month to about once per year, typically about once per quarter to about once per year.

[0824] After an initial treatment regimen (e.g., loading dose), the treatments can be administered on a less frequent basis.

[0825] The skilled artisan will appreciate that certain factors can influence the dosage and timing required to effectively treat a subject, including but not limited to the severity of the disease or disorder, previous treatments, the general health or age of the subject, and other diseases present. Moreover, treatment of a subject with a therapeutically effective amount of a composition can include a single treatment or a series of treatments.

[0826] Advances in mouse genetics have generated a number of mouse models for the study of various SOD1-associated neurodegenerative diseases that would benefit from reduction in the expression of SOD1. Such models can be used for in vivo testing of RNAi agents, as well as for determining a therapeutically effective dose. Suitable mouse models are known in the art and include, for example, the mouse models described elsewhere herein.

[0827] The pharmaceutical compositions of the present disclosure can be administered in a number of ways depending upon whether local or systemic treatment is desired and upon the area to be treated. Administration can be topical (e.g., by a transdermal patch), epidermal and transdermal, oral or parenteral. Parenteral administration includes intravenous, intraarterial, subcutaneous, intraperitoneal or intramuscular injection or infusion; subdermal, e.g., via an implanted device; or intracranial, e.g., by intraparenchymal, intrathecal or intraventricular, administration.

[0828] The RNAi agents can be delivered in a manner to target a particular tissue, such as the liver, the CNS (e.g., neuronal, glial or vascular tissue of the brain), or both the liver and CNS.

[0829] Pharmaceutical compositions and formulations for topical administration can include transdermal patches, ointments, lotions, creams, gels, drops, suppositories, sprays, liquids and powders. Conventional pharmaceutical carriers, aqueous, powder or oily bases, thickeners and the like can be necessary or desirable. Coated condoms, gloves and the like can also be useful. Suitable topical formulations include those in which the RNAi agents featured in the disclosure are in admixture with a topical delivery agent such as lipids, liposomes, fatty acids, fatty acid esters, steroids, chelating agents and surfactants. Suitable lipids and liposomes include neutral (e.g., dioleoylphosphatidyl DOPE ethanolamine, dimyristoylphosphatidyl choline DMPC, distearolyphosphatidyl choline) negative (e.g., dimyristoylphosphatidyl glycerol DMPG) and cationic (e.g., dioleoyltetramethylaminopropyl DOTAP and dioleoylphosphatidyl ethanolamine DOTMA). RNAi agents featured in the disclosure can be encapsulated within liposomes or can form complexes thereto, in particular to cationic liposomes. Alternatively, RNAi agents can be complexed to lipids, in particular to cationic lipids. Suitable fatty acids and esters include but are not limited to arachidonic acid, oleic acid, eicosanoic acid, lauric acid, caprylic acid, capric acid, myristic acid, palmitic acid, stearic acid, linoleic acid, linolenic acid, dicaprate, tricaprate, monoolein, dilaurin, glyceryl 1-monocaprate, 1-dodecylazacycloheptan-2-one, an acylcarnitine, an acylcholine, or a C₁₋₂₀ alkyl ester (e.g., isopropylmyristate IPM), monoglyceride, diglyceride or pharmaceutically acceptable salt thereof. Topical formulations are described in detail in U.S. Pat. No. 6,747,014, which is incorporated herein by reference.

[0830] A. RNAi Agent Formulations Comprising Membranous Molecular Assemblies

[0831] A RNAi agent for use in the compositions and methods of the disclosure can be formulated for delivery in a membranous molecular assembly, e.g., a liposome or a micelle. As used herein, the term “liposome” refers to a vesicle composed of amphiphilic lipids arranged in at least one bilayer, e.g., one bilayer or a plurality of bilayers. Liposomes include unilamellar and multilamellar vesicles that have a membrane formed from a lipophilic material and an aqueous interior. The aqueous portion contains the RNAi agent composition. The lipophilic material isolates the aqueous interior from an aqueous exterior, which typically does not include the RNAi agent composition, although in some examples, it may. Liposomes are useful for the transfer and delivery of active ingredients to the site of action. Because the liposomal membrane is structurally similar to biological membranes, when liposomes are applied to a tissue, the liposomal bilayer fuses with bilayer of the cellular membranes. As the merging of the liposome and cell progresses, the internal aqueous contents that include the RNAi agent are delivered into the cell where the RNAi agent can specifically bind to a target RNA and can mediate RNAi. In some cases the liposomes are also specifically targeted, e.g., to direct the RNAi agent to particular cell types.

[0832] A liposome containing an RNAi agent can be prepared by a variety of methods. In one example, the lipid component of a liposome is dissolved in a detergent so that micelles are formed with the lipid component. For example, the lipid component can be an amphipathic cationic lipid or lipid conjugate. The detergent can have a high critical micelle concentration and may be nonionic. Exemplary detergents include cholate, CHAPS, octylglucoside, deoxycholate, and lauroyl sarcosine. The RNAi agent preparation is then added to the micelles that include the lipid component. The cationic groups on the lipid interact with the RNAi agent and condense around the RNAi agent to form a liposome. After condensation, the detergent is removed, e.g., by dialysis, to yield a liposomal preparation of RNAi agent.

[0833] If necessary a carrier compound that assists in condensation can be added during the condensation reaction, e.g., by controlled addition. For example, the carrier compound can be a polymer other than a nucleic acid (e.g., spermine or spermidine). pH can also be adjusted to favor condensation.

[0834] Methods for producing stable polynucleotide delivery vehicles, which incorporate a polynucleotide/cationic lipid complex as structural components of the delivery vehicle, are further described in, e.g., WO 96/37194, the entire contents of which are incorporated herein by reference. Liposome formation can also include one or more aspects of exemplary methods described in Felgner, P. L. et al., (1987) Proc. Natl. Acad. Sci. USA 8:7413-7417; U.S. Pat. Nos. 4,897,355; 5,171,678; Bangham et al., (1965) M. Mol. Biol. 23:238; Olson et al., (1979) Biochim. Biophys. Acta 557:9; Szoka et al., (1978) Proc. Natl. Acad. Sci. 75: 4194; Mayhew et al., (1984) Biochim. Biophys. Acta 775:169; Kim et al., (1983) Biochim. Biophys. Acta 728:339; and Fukunaga et al., (1984) Endocrinol. 115:757. Commonly used techniques for preparing lipid aggregates of appropriate size for use as delivery vehicles include sonication and freeze-thaw plus extrusion (see, e.g., Mayer et al., (1986) Biochim. Biophys. Acta 858:161. Microfluidization can be used when consistently small (50 to 200 nm) and relatively uniform aggregates are desired (Mayhew et al., (1984) Biochim. Biophys. Acta 775:169. These methods are readily adapted to packaging RNAi agent preparations into liposomes.

[0835] Liposomes fall into two broad classes. Cationic liposomes are positively charged liposomes which interact with the negatively charged nucleic acid molecules to form a stable complex. The positively charged nucleic acid/liposome complex binds to the negatively charged cell surface and is internalized in an endosome. Due to the acidic pH within the endosome, the liposomes are ruptured, releasing their contents into the cell cytoplasm (Wang et al. (1987) Biochem. Biophys. Res. Commun., 147:980-985).

[0836] Liposomes, which are pH-sensitive or negatively charged, entrap nucleic acids rather than complex with them. Since both the nucleic acid and the lipid are similarly charged, repulsion rather than complex formation occurs. Nevertheless, some nucleic acid is entrapped within the aqueous interior of these liposomes. pH sensitive liposomes have been used to deliver nucleic acids encoding the thymidine kinase gene to cell monolayers in culture. Expression of the exogenous gene was detected in the target cells (Zhou et al. (1992) Journal of Controlled Release, 19:269-274).

[0837] One major type of liposomal composition includes phospholipids other than naturally-derived phosphatidylcholine. Neutral liposome compositions, for example, can be formed from dimyristoyl phosphatidylcholine (DMPC) or dipalmitoyl phosphatidylcholine (DPPC). Anionic liposome compositions generally are formed from dimyristoyl phosphatidylglycerol, while anionic fusogenic liposomes are formed primarily from dioleoyl phosphatidylethanolamine (DOPE). Another type of liposomal composition is formed from phosphatidylcholine (PC) such as, for example, soybean PC, and egg PC. Another type is formed from mixtures of phospholipid or phosphatidylcholine or cholesterol.

[0838] Examples of other methods to introduce liposomes into cells in vitro and in vivo include U.S. Pat. Nos. 5,283,185; 5,171,678; WO 94/00569; WO 93/24640; WO 91/16024; Felgner, (1994) J. Biol. Chem. 269:2550; Nabel, (1993) Proc. Natl. Acad. Sci. 90:11307; Nabel, (1992) Human Gene Ther. 3:649; Gershon, (1993) Biochem. 32:7143; and Strauss, (1992) EMBO J. 11:417.

[0839] Non-ionic liposomal systems have also been examined to determine their utility in the delivery of drugs to the skin, in particular systems comprising non-ionic surfactant and cholesterol. Non-ionic liposomal formulations comprising Novasome™ I (glyceryl dilaurate/cholesterol/polyoxyethylene-10-stearyl ether) and Novasome™ II (glyceryl distearate/cholesterol/polyoxyethylene-10-stearyl ether) were used to deliver cyclosporin-A into the dermis of mouse skin. Results indicated that such non-ionic liposomal systems were effective in facilitating the deposition of cyclosporine A into different layers of the skin (Hu et al., (1994) S.T.P. Pharma. Sci., 4(6):466).

[0840] Liposomes also include “sterically stabilized” liposomes, a term which, as used herein, refers to liposomes comprising one or more specialized lipids that, when incorporated into liposomes, result in enhanced circulation lifetimes relative to liposomes lacking such specialized lipids. Examples of sterically stabilized liposomes are those in which part of the vesicle-forming lipid portion of the liposome (A) comprises one or more glycolipids, such as monosialoganglioside G_{M1}, or (B) is derivatized with one or more hydrophilic polymers, such as a polyethylene glycol (PEG) moiety. While not wishing to be bound by any particular theory, it is thought in the art that, at least for sterically stabilized liposomes containing gangliosides, sphingomyelin, or PEG-derivatized lipids, the enhanced circulation half-life of these sterically stabilized liposomes derives from a reduced uptake into cells of the reticuloendothelial system (RES) (Allen et al., (1987) FEBS Letters, 223:42; Wu et al., (1993) Cancer Research, 53:3765).

[0841] Various liposomes comprising one or more glycolipids are known in the art. Papahadjopoulos et al. (Ann. N.Y. Acad. Sci., (1987), 507:64) reported the ability of monosialoganglioside G_{M1}, galactocerebroside sulfate and phosphatidylinositol to improve blood half-lives of liposomes. These findings were expounded upon by Gabizon et al. (Proc. Natl. Acad. Sci. U.S.A., (1988), 85:6949). U.S. Pat. No. 4,837,028 and WO 88/04924, both to Allen et al., disclose liposomes comprising (1) sphingomyelin and (2) the ganglioside G_{M1} or a galactocerebroside sulfate ester. U.S. Pat. No. 5,543,152 (Webb et al.) discloses liposomes comprising sphingomyelin. Liposomes comprising 1,2-sn-dimyristoylphosphatidylcholine are disclosed in WO 97/13499 (Lim et al).

[0842] In one embodiment, cationic liposomes are used. Cationic liposomes possess the advantage of being able to fuse to the cell membrane. Non-cationic liposomes, although not able to fuse as efficiently with the plasma membrane, are taken up by macrophages in vivo and can be used to deliver RNAi agents to macrophages.

[0843] Further advantages of liposomes include: liposomes obtained from natural phospholipids are biocompatible and biodegradable; liposomes can incorporate a wide range of water and lipid soluble drugs; liposomes can protect encapsulated RNAi agents in their internal compartments from metabolism and degradation (Rosoff, in “Pharmaceutical Dosage Forms,” Lieberman, Rieger and Banker (Eds.), 1988, volume 1, p. 245). Important considerations in the preparation of liposome formulations are the lipid surface charge, vesicle size and the aqueous volume of the liposomes.

[0844] A positively charged synthetic cationic lipid, N-[1-(2,3-dioleyloxy)propyl]-N,N,N-trimethylammonium chloride (DOTMA) can be used to form small liposomes that interact spontaneously with nucleic acid to form lipid-nucleic acid complexes which are capable of fusing with the negatively charged lipids of the cell membranes of tissue culture cells, resulting in delivery of RNAi agent (see, e.g., Felgner, P. L. et al., (1987) Proc. Natl. Acad. Sci. USA 8:7413-7417, and U.S. Pat. No. 4,897,355 for a description of DOTMA and its use with DNA).

[0845] A DOTMA analogue, 1,2-bis(oleoyloxy)-3-(trimethylammonia)propane (DOTAP) can be used in combination with a phospholipid to form DNA-complexing vesicles. Lipofectin™ Bethesda Research Laboratories, Gaithersburg, Md.) is an effective agent for the delivery of highly anionic nucleic acids into living tissue culture cells that comprise positively charged DOTMA liposomes which interact spontaneously with negatively charged polynucleotides to form complexes. When enough positively charged liposomes are used, the net charge on the resulting complexes is also positive. Positively charged complexes prepared in this way spontaneously attach to negatively charged cell surfaces, fuse with the plasma membrane, and efficiently deliver functional nucleic acids into, for example, tissue culture cells. Another commercially available cationic lipid, 1,2-bis(oleoyloxy)-3,3-(trimethylammonia)propane (“DOTAP”) (Boehringer Mannheim, Indianapolis, Indiana) differs from DOTMA in that the oleoyl moieties are linked by ester, rather than ether linkages.

[0846] Other reported cationic lipid compounds include those that have been conjugated to a variety of moieties including, for example, carboxyspermine which has been conjugated to one of two types of lipids and includes compounds such as 5-carboxyspermylglycine dioctaoleoylamide (“DOGS”) (Transfectam™, Promega, Madison, Wisconsin) and dipalmitoylphosphatidylethanolamine 5-carboxyspermyl-amide (“DPPES”) (see, e.g., U.S. Pat. No. 5,171,678).

[0847] Another cationic lipid conjugate includes derivatization of the lipid with cholesterol (“DC-Chol”) which has been formulated into liposomes in combination with DOPE (See, Gao, X. and Huang, L., (1991) Biochim. Biophys. Res. Commun. 179:280). Lipopolylysine, made by conjugating polylysine to DOPE, has been reported to be effective for transfection in the presence of serum (Zhou, X. et al., (1991) Biochim. Biophys. Acta 1065:8). For certain cell lines, these liposomes containing conjugated cationic lipids, are said to exhibit lower toxicity and provide more efficient transfection than the DOTMA-containing compositions. Other commercially available cationic lipid products include DMRIE and DMRIE-HP (Vical, La Jolla, California) and Lipofectamine (DOSPA) (Life Technology, Inc., Gaithersburg, Maryland). Other cationic lipids suitable for the delivery of oligonucleotides are described in WO 98/39359 and WO 96/37194.

[0848] Liposomal formulations are particularly suited for topical administration, liposomes present several advantages over other formulations. Such advantages include reduced side effects related to high systemic absorption of the administered drug, increased accumulation of the administered drug at the desired target, and the ability to administer RNAi agent into the skin. In some implementations, liposomes are used for delivering RNAi agent to epidermal cells and also to enhance the penetration of RNAi agent into dermal tissues, e.g., into skin. For example, the liposomes can be applied topically. Topical delivery of drugs formulated as liposomes to the skin has been documented (see, e.g., Weiner et al., (1992) Journal of Drug Targeting, vol. 2, 405-410 and du Plessis et al., (1992) Antiviral Research, 18:259-265; Mannino, R. J. and Fould-Fogerite, S., (1998) Biotechniques 6:682-690; Itani, T. et al., (1987) Gene 56:267-276; Nicolau, C. et al. (1987) Meth. Enzymol. 149:157-176; Straubinger, R. M. and Papahadjopoulos, D. (1983) Meth. Enzymol. 101:512-527; Wang, C. Y. and Huang, L., (1987) Proc. Natl. Acad. Sci. USA 84:7851-7855).

[0849] Non-ionic liposomal systems have also been examined to determine their utility in the delivery of drugs to the skin, in particular systems comprising non-ionic surfactant and cholesterol. Non-ionic liposomal formulations comprising Novasome I (glyceryl dilaurate/cholesterol/polyoxyethylene-10-stearyl ether) and Novasome II (glyceryl distearate/cholesterol/polyoxyethylene-10-stearyl ether) were used to deliver a drug into the dermis of mouse skin. Such formulations with RNAi agent are useful for treating a dermatological disorder.

[0850] Liposomes that include RNAi agents can be made highly deformable. Such deformability can enable the liposomes to penetrate through pore that are smaller than the average radius of the liposome. For example, transfersomes are a type of deformable liposomes. Transferosomes can be made by adding surface edge activators, usually surfactants, to a standard liposomal composition. Transfersomes that include RNAi agent can be delivered, for example, subcutaneously by infection in order to deliver RNAi agent to keratinocytes in the skin. In order to cross intact mammalian skin, lipid vesicles must pass through a series of fine pores, each with a diameter less than 50 nm, under the influence of a suitable transdermal gradient. In addition, due to the lipid properties, these transferosomes can be self-optimizing (adaptive to the shape of pores, e.g., in the skin), self-repairing, and can frequently reach their targets without fragmenting, and often self-loading.

[0851] Other formulations amenable to the present disclosure are described in PCT publication No. WO 2008/042973.

[0852] Transfersomes, yet another type of liposomes, are highly deformable lipid aggregates which are attractive candidates for drug delivery vehicles. Transfersomes can be described as lipid droplets which are so highly deformable that they are easily able to penetrate through pores which are smaller than the droplet. Transfersomes are adaptable to the environment in which they are used, e.g., they are self-optimizing (adaptive to the shape of pores in the skin), self-repairing, frequently reach their targets without fragmenting, and often self-loading. To make transfersomes it is possible to add surface edge-activators, usually surfactants, to a standard liposomal composition. Transfersomes have been used to deliver serum albumin to the skin. The transfersome-mediated delivery of serum albumin has been shown to be as effective as subcutaneous injection of a solution containing serum albumin.

[0853] Surfactants find wide application in formulations such as those described herein, particularly in emulsions (including microemulsions) and liposomes. The most common way of classifying and ranking the properties of the many different types of surfactants, both natural and synthetic, is by the use of the hydrophile/lipophile balance (HLB). The nature of the hydrophilic group (also known as the “head”) provides the most useful means for categorizing the different surfactants used in formulations (Rieger, in Pharmaceutical Dosage Forms, Marcel Dekker, Inc., New York, N.Y., 1988, p. 285).

[0854] If the surfactant molecule is not ionized, it is classified as a nonionic surfactant. Nonionic surfactants find wide application in pharmaceutical and cosmetic products and are usable over a wide range of pH values. In general, their HLB values range from 2 to about 18 depending on their structure. Nonionic surfactants include nonionic esters such as ethylene glycol esters, propylene glycol esters, glyceryl esters, polyglyceryl esters, sorbitan esters, sucrose esters, and ethoxylated esters. Nonionic alkanolamides and ethers such as fatty alcohol ethoxylates, propoxylated alcohols, and ethoxylated/propoxylated block polymers are also included in this class. The polyoxyethylene surfactants are the most popular members of the nonionic surfactant class.

[0855] If the surfactant molecule carries a negative charge when it is dissolved or dispersed in water, the surfactant is classified as anionic. Anionic surfactants include carboxylates such as soaps, acyl lactylates, acyl amides of amino acids, esters of sulfuric acid such as alkyl sulfates and ethoxylated alkyl sulfates, sulfonates such as alkyl benzene sulfonates, acyl isethionates, acyl taurates and sulfosuccinates, and phosphates. The most important members of the anionic surfactant class are the alkyl sulfates and the soaps.

[0856] If the surfactant molecule carries a positive charge when it is dissolved or dispersed in water, the surfactant is classified as cationic. Cationic surfactants include quaternary ammonium salts and ethoxylated amines. The quaternary ammonium salts are the most used members of this class.

[0857] If the surfactant molecule has the ability to carry either a positive or negative charge, the surfactant is classified as amphoteric. Amphoteric surfactants include acrylic acid derivatives, substituted alkylamides, N-alkylbetaines and phosphatides.

[0858] The use of surfactants in drug products, formulations and in emulsions has been reviewed (Rieger, in Pharmaceutical Dosage Forms, Marcel Dekker, Inc., New York, N.Y., 1988, p. 285).

[0859] The RNAi agent for use in the methods of the disclosure can also be provided as micellar formulations. “Micelles” are defined herein as a particular type of molecular assembly in which amphipathic molecules are arranged in a spherical structure such that all the hydrophobic portions of the molecules are directed inward, leaving the hydrophilic portions in contact with the surrounding aqueous phase. The converse arrangement exists if the environment is hydrophobic.

[0860] A mixed micellar formulation suitable for delivery through transdermal membranes may be prepared by mixing an aqueous solution of the siRNA composition, an alkali metal C₈ to C₂₂ alkyl sulphate, and a micelle forming compounds. Exemplary micelle forming compounds include lecithin, hyaluronic acid, pharmaceutically acceptable salts of hyaluronic acid, glycolic acid, lactic acid, chamomile extract, cucumber extract, oleic acid, linoleic acid, linolenic acid, monoolein, monooleates, monolaurates, borage oil, evening of primrose oil, menthol, trihydroxy oxo cholanyl glycine and pharmaceutically acceptable salts thereof, glycerin, polyglycerin, lysine, polylysine, triolein, polyoxyethylene ethers and analogues thereof, polidocanol alkyl ethers and analogues thereof, chenodeoxycholate, deoxycholate, and mixtures thereof. The micelle forming compounds may be added at the same time or after addition of the alkali metal alkyl sulphate. Mixed micelles will form with substantially any kind of mixing of the ingredients but vigorous mixing in order to provide smaller size micelles.

[0861] In one method a first micellar composition is prepared which contains the siRNA composition and at least the alkali metal alkyl sulphate. The first micellar composition is then mixed with at least three micelle forming compounds to form a mixed micellar composition. In another method, the micellar composition is prepared by mixing the siRNA composition, the alkali metal alkyl sulphate and at least one of the micelle forming compounds, followed by addition of the remaining micelle forming compounds, with vigorous mixing.

[0862] Phenol or m-cresol may be added to the mixed micellar composition to stabilize the formulation and protect against bacterial growth. Alternatively, phenol or m-cresol may be added with the micelle forming ingredients. An isotonic agent such as glycerin may also be added after formation of the mixed micellar composition.

[0863] For delivery of the micellar formulation as a spray, the formulation can be put into an aerosol dispenser and the dispenser is charged with a propellant. The propellant, which is under pressure, is in liquid form in the dispenser. The ratios of the ingredients are adjusted so that the aqueous and propellant phases become one, i.e., there is one phase. If there are two phases, it is necessary to shake the dispenser prior to dispensing a portion of the contents, e.g., through a metered valve. The dispensed dose of pharmaceutical agent is propelled from the metered valve in a fine spray.

[0864] Propellants may include hydrogen-containing chlorofluorocarbons, hydrogen-containing fluorocarbons, dimethyl ether and diethyl ether. In certain embodiments, HFA 134a (1,1,1,2 tetrafluoroethane) may be used.

[0865] The specific concentrations of the essential ingredients can be determined by relatively straightforward experimentation. For absorption through the oral cavities, it is often desirable to increase, e.g., at least double or triple, the dosage for through injection or administration through the gastrointestinal tract.

[0866] Lipid Particles

[0867] RNAi agents, e.g., dsRNAs of in the disclosure may be fully encapsulated in a lipid formulation, e.g., a LNP, or other nucleic acid-lipid particle.

[0868] As used herein, the term “LNP” refers to a stable nucleic acid-lipid particle. LNPs typically contain a cationic lipid, a non-cationic lipid, and a lipid that prevents aggregation of the particle (e.g., a PEG-lipid conjugate). LNPs are extremely useful for systemic applications, as they exhibit extended circulation lifetimes following intravenous (i.v.) injection and accumulate at distal sites (e.g., sites physically separated from the administration site). LNPs include “pSPLP,” which include an encapsulated condensing agent-nucleic acid complex as set forth in WO 00/03683. The particles of the present disclosure typically have a mean diameter of about 50 nm to about 150 nm, more typically about 60 nm to about 130 nm, more typically about 70 nm to about 110 nm, most typically about 70 nm to about 90 nm, and are substantially nontoxic. In addition, the nucleic acids when present in the nucleic acid-lipid particles of the present disclosure are resistant in aqueous solution to degradation with a nuclease. Nucleic acid-lipid particles and their method of preparation are disclosed in, e.g., U.S. Pat. Nos. 5,976,567; 5,981,501; 6,534,484; 6,586,410; 6,815,432; United States Patent publication No. 2010/0324120 and WO 96/40964.

[0869] In one embodiment, the lipid to drug ratio (mass/mass ratio) (e.g., lipid to dsRNA ratio) will be in the range of from about 1:1 to about 50:1, from about 1:1 to about 25:1, from about 3:1 to about 15:1, from about 4:1 to about 10:1, from about 5:1 to about 9:1, or about 6:1 to about 9:1. Ranges intermediate to the above recited ranges are also contemplated to be part of the disclosure.

[0870] Certain specific LNP formulations for delivery of RNAi agents have been described in the art, including, e.g., “LNP01” formulations as described in, e.g., WO 2008/042973, which is hereby incorporated by reference.

[0871] Additional exemplary lipid-dsRNA formulations are identified in the table below.

| | | cationic lipid/non-cationic |
|---|---|---|
| | | lipid/cholesterol/PEG-lipid conjugate |
| | Ionizable/Cationic Lipid | Lipid:siRNA ratio |
| SNALP-1 | 1,2-Dilinolenyloxy-N,N- | DLinDMA/DPPC/Cholesterol/PEG- |
| | dimethylaminopropane (DLinDMA) | cDMA |
| | | (57.1/7.1/34.4/1.4) |
| | | lipid:siRNA~7:1 |
| 2-XTC | 2,2-Dilinoleyl-4-dimethylaminoethyl-[1,3]- | XTC/DPPC/Cholesterol/PEG-cDMA |
| | dioxolane (XTC) | 57.1/7.1/34.4/1.4 |
| | | lipid:siRNA~7:1 |
| LNP05 | 2,2-Dilinoleyl-4-dimethylaminoethyl-[1,3]- | XTC/DSPC/Cholesterol/PEG-DMG |
| | dioxolane (XTC) | 57.5/7.5/31.5/3.5 |
| | | lipid:siRNA~6:1 |
| LNP06 | 2,2-Dilinoleyl-4-dimethylaminoethyl-[1,3]- | XTC/DSPC/Cholesterol/PEG-DMG |
| | dioxolane (XTC) | 57.5/7.5/31.5/3.5 |
| | | lipid:siRNA~11:1 |
| LNP07 | 2,2-Dilinoleyl-4-dimethylaminoethyl-[1,3]- | XTC/DSPC/Cholesterol/PEG-DMG |
| | dioxolane (XTC) | 60/7.5/31/1.5, |
| | | lipid:siRNA~6:1 |
| LNP08 | 2,2-Dilinoleyl-4-dimethylaminoethyl-[1,3]- | XTC/DSPC/Cholesterol/PEG-DMG |
| | dioxolane (XTC) | 60/7.5/31/1.5, |
| | | lipid:siRNA~11:1 |
| LNP09 | 2,2-Dilinoleyl-4-dimethylaminoethyl-[1,3]- | XTC/DSPC/Cholesterol/PEG-DMG |
| | dioxolane (XTC) | 50/10/38.5/1.5 |
| | | Lipid:siRNA 10:1 |
| LNP10 | (3aR,5s,6aS)-N,N-dimethyl-2,2- | ALN100/DSPC/Cholesterol/PEG- |
| | di((9Z,12Z)-octadeca-9,12- | DMG |
| | dienyl)tetrahydro-3aH- | 50/10/38.5/1.5 |
| | cyclopenta[d][1,3]dioxol-5-amine | Lipid:siRNA 10:1 |
| | (ALN100) | |
| LNP11 | (6Z,9Z,28Z,31Z)-heptatriaconta-6,9,28,31- | MC-3/DSPC/Cholesterol/PEG-DMG |
| | tetraen-19-yl 4-(dimethylamino)butanoate | 50/10/38.5/1.5 |
| | (MC3) | Lipid:siRNA 10:1 |
| LNP12 | 1,1′-(2-(4-(2-((2-(bis(2- | Tech G1/DSPC/Cholesterol/PEG- |
| | hydroxydodecyl)amino)ethyl)(2- | DMG |
| | hydroxydodecyl)amino)ethyl)piperazin-1- | 50/10/38.5/1.5 |
| | yl)ethylazanediyl)didodecan-2-ol (Tech | Lipid:siRNA 10:1 |
| | G1) | |
| LNP13 | XTC | XTC/DSPC/Chol/PEG-DMG |
| | | 50/10/38.5/1.5 |
| | | Lipid:siRNA:33:1 |
| LNP14 | MC3 | MC3/DSPC/Chol/PEG-DMG |
| | | 40/15/40/5 |
| | | Lipid:siRNA:11:1 |
| LNP15 | MC3 | MC3/DSPC/Chol/PEG-DSG/GalNAc- |
| | | PEG-DSG |
| | | 50/10/35/4.5/0.5 |
| | | Lipid:siRNA:11:1 |
| LNP16 | MC3 | MC3/DSPC/Chol/PEG-DMG |
| | | 50/10/38.5/1.5 |
| | | Lipid:siRNA:7:1 |
| LNP17 | MC3 | MC3/DSPC/Chol/PEG-DSG |
| | | 50/10/38.5/1.5 |
| | | Lipid:siRNA:10:1 |
| LNP18 | MC3 | MC3/DSPC/Chol/PEG-DMG |
| | | 50/10/38.5/1.5 |
| | | Lipid:siRNA:12:1 |
| LNP19 | MC3 | MC3/DSPC/Chol/PEG-DMG |
| | | 50/10/35/5 |
| | | Lipid:siRNA:8:1 |
| LNP20 | MC3 | MC3/DSPC/Chol/PEG-DPG |
| | | 50/10/38.5/1.5 |
| | | Lipid:siRNA:10:1 |
| LNP21 | C12-200 | C12-200/DSPC/Chol/PEG-DSG |
| | | 50/10/38.5/1.5 |
| | | Lipid:siRNA:7:1 |
| LNP22 | XTC | XTC/DSPC/Chol/PEG-DSG |
| | | 50/10/38.5/1.5 |
| | | Lipid:siRNA:10:1 |

DSPC: distearoylphosphatidylcholine
DPPC: dipalmitoylphosphatidylcholine
PEG-DMG: PEG-didimyristoyl glycerol (C14-PEG, or PEG-C14) (PEG with avg mol wt of 2000)
PEG-DSG: PEG-distyryl glycerol (C18-PEG, or PEG-C18) (PEG with avg mol wt of 2000)
PEG-cDMA: PEG-carbamoyl-1,2-dimyristyloxypropylamine (PEG with avg mol wt of 2000)
SNALP (1,2-Dilinolenyloxy-N,N-dimethylaminopropane (DLinDMA)) comprising formulations are described in WO 2009/127060, which is hereby incorporated by reference.
XTC comprising formulations are described in WO 2010/088537, the entire contents of which are hereby incorporated herein by reference.
MC3 comprising formulations are described, e.g., in United States Patent Publication No. 2010/0324120, the entire contents of which are hereby incorporated by reference.
ALNY-100 comprising formulations are described in WO 2010/054406, the entire contents of which are hereby incorporated herein by reference.
C12-200 comprising formulations are described in WO 2010/129709, the entire contents of which are hereby incorporated herein by reference.

[0872] Compositions and formulations for oral administration include powders or granules, microparticulates, nanoparticulates, suspensions or solutions in water or non-aqueous media, capsules, gel capsules, sachets, tablets or minitablets. Thickeners, flavoring agents, diluents, emulsifiers, dispersing aids or binders can be desirable. In some embodiments, oral formulations are those in which dsRNAs featured in the disclosure are administered in conjunction with one or more penetration enhancer surfactants and chelators. Suitable surfactants include fatty acids or esters or salts thereof, bile acids or salts thereof. Suitable bile acids/salts include chenodeoxycholic acid (CDCA) and ursodeoxychenodeoxycholic acid (UDCA), cholic acid, dehydrocholic acid, deoxycholic acid, glucholic acid, glycholic acid, glycodeoxycholic acid, taurocholic acid, taurodeoxycholic acid, sodium tauro-24,25-dihydro-fusidate and sodium glycodihydrofusidate. Suitable fatty acids include arachidonic acid, undecanoic acid, oleic acid, lauric acid, caprylic acid, capric acid, myristic acid, palmitic acid, stearic acid, linoleic acid, linolenic acid, dicaprate, tricaprate, monoolein, dilaurin, glyceryl 1-monocaprate, 1-dodecylazacycloheptan-2-one, an acylcarnitine, an acylcholine, or a monoglyceride, a diglyceride or a pharmaceutically acceptable salt thereof (e.g., sodium). In some embodiments, combinations of penetration enhancers are used, for example, fatty acids/salts in combination with bile acids/salts. One exemplary combination is the sodium salt of lauric acid, capric acid and UDCA. Further penetration enhancers include polyoxyethylene-9-lauryl ether, polyoxyethylene-20-cetyl ether. DsRNAs featured in the disclosure can be delivered orally, in granular form including sprayed dried particles, or complexed to form micro or nanoparticles. DsRNA complexing agents include poly-amino acids; polyimines; polyacrylates; polyalkylacrylates, polyoxethanes, polyalkylcyanoacrylates; cationized gelatins, albumins, starches, acrylates, polyethyleneglycols (PEG) and starches; polyalkylcyanoacrylates; DEAE-derivatized polyimines, pollulans, celluloses and starches. Suitable complexing agents include chitosan, N-trimethylchitosan, poly-L-lysine, polyhistidine, polyornithine, polyspermines, protamine, polyvinylpyridine, polythiodiethylaminomethylethylene P(TDAE), polyaminostyrene (e.g., p-amino), poly(methylcyanoacrylate), poly(ethylcyanoacrylate), poly(butylcyanoacrylate), poly(isobutylcyanoacrylate), poly(isohexylcynaoacrylate), DEAE-methacrylate, DEAE-hexylacrylate, DEAE-acrylamide, DEAE-albumin and DEAE-dextran, polymethylacrylate, polyhexylacrylate, poly(D,L-lactic acid), poly(DL-lactic-co-glycolic acid (PLGA), alginate, and polyethyleneglycol (PEG). Oral formulations for dsRNAs and their preparation are described in detail in U.S. Pat. No. 6,887,906, U.S. 2003/0027780, and U.S. Pat. No. 6,747,014, each of which is incorporated herein by reference.

[0873] Compositions and formulations for parenteral, intraparenchymal (into the brain), intrathecal, intraventricular or intrahepatic administration can include sterile aqueous solutions which can also contain buffers, diluents and other suitable additives such as, but not limited to, penetration enhancers, carrier compounds and other pharmaceutically acceptable carriers or excipients.

[0874] Pharmaceutical compositions of the present disclosure include, but are not limited to, solutions, emulsions, and liposome-containing formulations. These compositions can be generated from a variety of components that include, but are not limited to, preformed liquids, self-emulsifying solids and self-emulsifying semisolids. Particularly preferred are formulations that target the brain when treating SOD-1-associated diseases or disorders.

[0875] The pharmaceutical formulations of the present disclosure, which can conveniently be presented in unit dosage form, can be prepared according to conventional techniques well known in the pharmaceutical industry. Such techniques include the step of bringing into association the active ingredients with the pharmaceutical carrier(s) or excipient(s). In general, the formulations are prepared by uniformly and intimately bringing into association the active ingredients with liquid carriers or finely divided solid carriers or both, and then, if necessary, shaping the product.

[0876] The compositions of the present disclosure can be formulated into any of many possible dosage forms such as, but not limited to, tablets, capsules, gel capsules, liquid syrups, soft gels, suppositories, and enemas. The compositions of the present disclosure can also be formulated as suspensions in aqueous, non-aqueous or mixed media. Aqueous suspensions can further contain substances which increase the viscosity of the suspension including, for example, sodium carboxymethylcellulose, sorbitol or dextran. The suspension can also contain stabilizers.

[0877] Additional Formulations

[0878] i. Emulsions

[0879] The compositions of the present disclosure can be prepared and formulated as emulsions. Emulsions are typically heterogeneous systems of one liquid dispersed in another in the form of droplets usually exceeding 0.1 m in diameter (see e.g., Ansel's Pharmaceutical Dosage Forms and Drug Delivery Systems, Allen, LV., Popovich N G., and Ansel H C., 2004, Lippincott Williams & Wilkins (8th ed.), New York, NY; Idson, in Pharmaceutical Dosage Forms, Lieberman, Rieger and Banker (Eds.), 1988, Marcel Dekker, Inc., New York, N.Y., volume 1, p. 199; Rosoff, in Pharmaceutical Dosage Forms, Lieberman, Rieger and Banker (Eds.), 1988, Marcel Dekker, Inc., New York, N.Y., Volume 1, p. 245; Block in Pharmaceutical Dosage Forms, Lieberman, Rieger and Banker (Eds.), 1988, Marcel Dekker, Inc., New York, N.Y., volume 2, p. 335; Higuchi et al., in Remington's Pharmaceutical Sciences, Mack Publishing Co., Easton, Pa., 1985, p. 301). Emulsions are often biphasic systems comprising two immiscible liquid phases intimately mixed and dispersed with each other. In general, emulsions can be of either the water-in-oil (w/o) or the oil-in-water (o/w) variety. When an aqueous phase is finely divided into and dispersed as minute droplets into a bulk oily phase, the resulting composition is called a water-in-oil (w/o) emulsion. Alternatively, when an oily phase is finely divided into and dispersed as minute droplets into a bulk aqueous phase, the resulting composition is called an oil-in-water (o/w) emulsion. Emulsions can contain additional components in addition to the dispersed phases, and the active drug which can be present as a solution in either aqueous phase, oily phase or itself as a separate phase. Pharmaceutical excipients such as emulsifiers, stabilizers, dyes, and anti-oxidants can also be present in emulsions as needed. Pharmaceutical emulsions can also be multiple emulsions that are comprised of more than two phases such as, for example, in the case of oil-in-water-in-oil (o/w/o) and water-in-oil-in-water (w/o/w) emulsions. Such complex formulations often provide certain advantages that simple binary emulsions do not. Multiple emulsions in which individual oil droplets of an o/w emulsion enclose small water droplets constitute a w/o/w emulsion. Likewise, a system of oil droplets enclosed in globules of water stabilized in an oily continuous phase provides an o/w/o emulsion.

[0880] Emulsions are characterized by little or no thermodynamic stability. Often, the dispersed or discontinuous phase of the emulsion is well dispersed into the external or continuous phase and maintained in this form through the means of emulsifiers or the viscosity of the formulation. Either of the phases of the emulsion can be a semisolid or a solid, as is the case of emulsion-style ointment bases and creams. Other means of stabilizing emulsions entail the use of emulsifiers that can be incorporated into either phase of the emulsion. Emulsifiers can broadly be classified into four categories: synthetic surfactants, naturally occurring emulsifiers, absorption bases, and finely dispersed solids (see e.g., Ansel's Pharmaceutical Dosage Forms and Drug Delivery Systems, Allen, LV., Popovich N G., and Ansel H C., 2004, Lippincott Williams & Wilkins (8th ed.), New York, NY; Idson, in Pharmaceutical Dosage Forms, Lieberman, Rieger and Banker (Eds.), 1988, Marcel Dekker, Inc., New York, N.Y., volume 1, p. 199).

[0881] Synthetic surfactants, also known as surface active agents, have found wide applicability in the formulation of emulsions and have been reviewed in the literature (see e.g., Ansel's Pharmaceutical Dosage Forms and Drug Delivery Systems, Allen, LV., Popovich N G., and Ansel H C., 2004, Lippincott Williams & Wilkins (8th ed.), New York, NY; Rieger, in Pharmaceutical Dosage Forms, Lieberman, Rieger and Banker (Eds.), 1988, Marcel Dekker, Inc., New York, N.Y., volume 1, p. 285; Idson, in Pharmaceutical Dosage Forms, Lieberman, Rieger and Banker (Eds.), Marcel Dekker, Inc., New York, N.Y., 1988, volume 1, p. 199). Surfactants are typically amphiphilic and comprise a hydrophilic and a hydrophobic portion. The ratio of the hydrophilic to the hydrophobic nature of the surfactant has been termed the hydrophile/lipophile balance (HLB) and is a valuable tool in categorizing and selecting surfactants in the preparation of formulations. Surfactants can be classified into different classes based on the nature of the hydrophilic group: nonionic, anionic, cationic and amphoteric (see e.g., Ansel's Pharmaceutical Dosage Forms and Drug Delivery Systems, Allen, LV., Popovich N G., and Ansel H C., 2004, Lippincott Williams & Wilkins (8th ed.), New York, NY Rieger, in Pharmaceutical Dosage Forms, Lieberman, Rieger and Banker (Eds.), 1988, Marcel Dekker, Inc., New York, N.Y., volume 1, p. 285).

[0882] Naturally occurring emulsifiers used in emulsion formulations include lanolin, beeswax, phosphatides, lecithin and acacia. Absorption bases possess hydrophilic properties such that they can soak up water to form w/o emulsions yet retain their semisolid consistencies, such as anhydrous lanolin and hydrophilic petrolatum. Finely divided solids have also been used as good emulsifiers especially in combination with surfactants and in viscous preparations. These include polar inorganic solids, such as heavy metal hydroxides, nonswelling clays such as bentonite, attapulgite, hectorite, kaolin, montmorillonite, colloidal aluminum silicate and colloidal magnesium aluminum silicate, pigments and nonpolar solids such as carbon or glyceryl tristearate.

[0883] A large variety of non-emulsifying materials are also included in emulsion formulations and contribute to the properties of emulsions. These include fats, oils, waxes, fatty acids, fatty alcohols, fatty esters, humectants, hydrophilic colloids, preservatives and antioxidants (Block, in Pharmaceutical Dosage Forms, Lieberman, Rieger and Banker (Eds.), 1988, Marcel Dekker, Inc., New York, N.Y., volume 1, p. 335; Idson, in Pharmaceutical Dosage Forms, Lieberman, Rieger and Banker (Eds.), 1988, Marcel Dekker, Inc., New York, N.Y., volume 1, p. 199).

[0884] Hydrophilic colloids or hydrocolloids include naturally occurring gums and synthetic polymers such as polysaccharides (for example, acacia, agar, alginic acid, carrageenan, guar gum, karaya gum, and tragacanth), cellulose derivatives (for example, carboxymethylcellulose and carboxypropylcellulose), and synthetic polymers (for example, carbomers, cellulose ethers, and carboxyvinyl polymers). These disperse or swell in water to form colloidal solutions that stabilize emulsions by forming strong interfacial films around the dispersed-phase droplets and by increasing the viscosity of the external phase.

[0885] Since emulsions often contain a number of ingredients such as carbohydrates, proteins, sterols and phosphatides that can readily support the growth of microbes, these formulations often incorporate preservatives. Commonly used preservatives included in emulsion formulations include methyl paraben, propyl paraben, quaternary ammonium salts, benzalkonium chloride, esters of p-hydroxybenzoic acid, and boric acid. Antioxidants are also commonly added to emulsion formulations to prevent deterioration of the formulation. Antioxidants used can be free radical scavengers such as tocopherols, alkyl gallates, butylated hydroxyanisole, butylated hydroxytoluene, or reducing agents such as ascorbic acid and sodium metabisulfite, and antioxidant synergists such as citric acid, tartaric acid, and lecithin.

[0886] The application of emulsion formulations via dermatological, oral and parenteral routes and methods for their manufacture have been reviewed in the literature (see e.g., Ansel's Pharmaceutical Dosage Forms and Drug Delivery Systems, Allen, LV., Popovich N G., and Ansel H C., 2004, Lippincott Williams & Wilkins (8th ed.), New York, NY; Idson, in Pharmaceutical Dosage Forms, Lieberman, Rieger and Banker (Eds.), 1988, Marcel Dekker, Inc., New York, N.Y., volume 1, p. 199). Emulsion formulations for oral delivery have been very widely used because of ease of formulation, as well as efficacy from an absorption and bioavailability standpoint (see e.g., Ansel's Pharmaceutical Dosage Forms and Drug Delivery Systems, Allen, LV., Popovich N G., and Ansel H C., 2004, Lippincott Williams & Wilkins (8th ed.), New York, NY; Rosoff, in Pharmaceutical Dosage Forms, Lieberman, Rieger and Banker (Eds.), 1988, Marcel Dekker, Inc., New York, N.Y., volume 1, p. 245; Idson, in Pharmaceutical Dosage Forms, Lieberman, Rieger and Banker (Eds.), 1988, Marcel Dekker, Inc., New York, N.Y., volume 1, p. 199). Mineral-oil base laxatives, oil-soluble vitamins and high fat nutritive preparations are among the materials that have commonly been administered orally as o/w emulsions.

[0887] ii. Microemulsions

[0888] In one embodiment of the present disclosure, the compositions of RNAi agents and nucleic acids are formulated as microemulsions. A microemulsion can be defined as a system of water, oil and amphiphile which is a single optically isotropic and thermodynamically stable liquid solution (see e.g., Ansel's Pharmaceutical Dosage Forms and Drug Delivery Systems, Allen, LV., Popovich N G., and Ansel H C., 2004, Lippincott Williams & Wilkins (8th ed.), New York, NY; Rosoff, in Pharmaceutical Dosage Forms, Lieberman, Rieger and Banker (Eds.), 1988, Marcel Dekker, Inc., New York, N.Y., volume 1, p. 245). Typically, microemulsions are systems that are prepared by first dispersing an oil in an aqueous surfactant solution and then adding a sufficient amount of a fourth component, generally an intermediate chain-length alcohol to form a transparent system. Therefore, microemulsions have also been described as thermodynamically stable, isotropically clear dispersions of two immiscible liquids that are stabilized by interfacial films of surface-active molecules (Leung and Shah, in: Controlled Release of Drugs: Polymers and Aggregate Systems, Rosoff, M., Ed., 1989, VCH Publishers, New York, pages 185-215). Microemulsions commonly are prepared via a combination of three to five components that include oil, water, surfactant, cosurfactant and electrolyte. Whether the microemulsion is of the water-in-oil (w/o) or an oil-in-water (o/w) type is dependent on the properties of the oil and surfactant used, and on the structure and geometric packing of the polar heads and hydrocarbon tails of the surfactant molecules (Schott, in Remington's Pharmaceutical Sciences, Mack Publishing Co., Easton, Pa., 1985, p. 271).

[0889] The phenomenological approach utilizing phase diagrams has been extensively studied and has yielded a comprehensive knowledge, to one skilled in the art, of how to formulate microemulsions (see e.g., Ansel's Pharmaceutical Dosage Forms and Drug Delivery Systems, Allen, LV., Popovich N G., and Ansel H C., 2004, Lippincott Williams & Wilkins (8th ed.), New York, NY; Rosoff, in Pharmaceutical Dosage Forms, Lieberman, Rieger and Banker (Eds.), 1988, Marcel Dekker, Inc., New York, N.Y., volume 1, p. 245; Block, in Pharmaceutical Dosage Forms, Lieberman, Rieger and Banker (Eds.), 1988, Marcel Dekker, Inc., New York, N.Y., volume 1, p. 335). Compared to conventional emulsions, microemulsions offer the advantage of solubilizing water-insoluble drugs in a formulation of thermodynamically stable droplets that are formed spontaneously.

[0890] Surfactants used in the preparation of microemulsions include, but are not limited to, ionic surfactants, non-ionic surfactants, Brij 96, polyoxyethylene oleyl ethers, polyglycerol fatty acid esters, tetraglycerol monolaurate (ML310), tetraglycerol monooleate (MO310), hexaglycerol monooleate (PO310), hexaglycerol pentaoleate (PO500), decaglycerol monocaprate (MCA750), decaglycerol monooleate (MO0750), decaglycerol sequioleate (SO750), decaglycerol decaoleate (DAO750), alone or in combination with cosurfactants. The cosurfactant, usually a short-chain alcohol such as ethanol, 1-propanol, and 1-butanol, serves to increase the interfacial fluidity by penetrating into the surfactant film and consequently creating a disordered film because of the void space generated among surfactant molecules. Microemulsions can, however, be prepared without the use of cosurfactants and alcohol-free self-emulsifying microemulsion systems are known in the art. The aqueous phase can typically be, but is not limited to, water, an aqueous solution of the drug, glycerol, PEG300, PEG400, polyglycerols, propylene glycols, and derivatives of ethylene glycol. The oil phase can include, but is not limited to, materials such as Captex 300, Captex 355, Capmul MCM, fatty acid esters, medium chain (C8-C12) mono, di, and tri-glycerides, polyoxyethylated glyceryl fatty acid esters, fatty alcohols, polyglycolized glycerides, saturated polyglycolized C8-C10 glycerides, vegetable oils and silicone oil.

[0891] Microemulsions are particularly of interest from the standpoint of drug solubilization and the enhanced absorption of drugs. Lipid based microemulsions (both o/w and w/o) have been proposed to enhance the oral bioavailability of drugs, including peptides (see e.g., U.S. Pat. Nos. 6,191,105; 7,063,860; 7,070,802; 7,157,099; Constantinides et al., Pharmaceutical Research, 1994, 11, 1385-1390; Ritschel, Meth. Find. Exp. Clin. Pharmacol., 1993, 13, 205). Microemulsions afford advantages of improved drug solubilization, protection of drug from enzymatic hydrolysis, possible enhancement of drug absorption due to surfactant-induced alterations in membrane fluidity and permeability, ease of preparation, ease of oral administration over solid dosage forms, improved clinical potency, and decreased toxicity (see e.g., U.S. Pat. Nos. 6,191,105; 7,063,860; 7,070,802; 7,157,099; Constantinides et al., Pharmaceutical Research, 1994, 11, 1385; Ho et al., J. Pharm. Sci., 1996, 85, 138-143). Often microemulsions can form spontaneously when their components are brought together at ambient temperature. This can be particularly advantageous when formulating thermolabile drugs, peptides or RNAi agents. Microemulsions have also been effective in the transdermal delivery of active components in both cosmetic and pharmaceutical applications. It is expected that the microemulsion compositions and formulations of the present disclosure will facilitate the increased systemic absorption of RNAi agents and nucleic acids from the gastrointestinal tract, as well as improve the local cellular uptake of RNAi agents and nucleic acids.

[0892] Microemulsions of the present disclosure can also contain additional components and additives such as sorbitan monostearate (Grill 3), Labrasol, and penetration enhancers to improve the properties of the formulation and to enhance the absorption of the RNAi agents and nucleic acids of the present disclosure. Penetration enhancers used in the microemulsions of the present disclosure can be classified as belonging to one of five broad categories—surfactants, fatty acids, bile salts, chelating agents, and non-chelating non-surfactants (Lee et al., Critical Reviews in Therapeutic Drug Carrier Systems, 1991, p. 92). Each of these classes has been discussed above.

[0893] iii. Microparticles

[0894] An RNAi agent of the disclosure may be incorporated into a particle, e.g., a microparticle. Microparticles can be produced by spray-drying, but may also be produced by other methods including lyophilization, evaporation, fluid bed drying, vacuum drying, or a combination of these techniques.

[0895] iv. Penetration Enhancers

[0896] In one embodiment, the present disclosure employs various penetration enhancers to effect the efficient delivery of nucleic acids, particularly RNAi agents, to the skin of animals. Most drugs are present in solution in both ionized and nonionized forms. However, usually only lipid soluble or lipophilic drugs readily cross cell membranes. It has been discovered that even non-lipophilic drugs can cross cell membranes if the membrane to be crossed is treated with a penetration enhancer. In addition to aiding the diffusion of non-lipophilic drugs across cell membranes, penetration enhancers also enhance the permeability of lipophilic drugs.

[0897] Penetration enhancers can be classified as belonging to one of five broad categories, i.e., surfactants, fatty acids, bile salts, chelating agents, and non-chelating non-surfactants (see e.g., Malmsten, M. Surfactants and polymers in drug delivery, Informa Health Care, New York, NY, 2002; Lee et al., Critical Reviews in Therapeutic Drug Carrier Systems, 1991, p. 92). Each of the above mentioned classes of penetration enhancers are described below in greater detail.

[0898] Surfactants (or “surface-active agents”) are chemical entities which, when dissolved in an aqueous solution, reduce the surface tension of the solution or the interfacial tension between the aqueous solution and another liquid, with the result that absorption of RNAi agents through the mucosa is enhanced. In addition to bile salts and fatty acids, these penetration enhancers include, for example, sodium lauryl sulfate, polyoxyethylene-9-lauryl ether and polyoxyethylene-20-cetyl ether) (see e.g., Malmsten, M. Surfactants and polymers in drug delivery, Informa Health Care, New York, NY, 2002; Lee et al., Critical Reviews in Therapeutic Drug Carrier Systems, 1991, p. 92); and perfluorochemical emulsions, such as FC-43. Takahashi et al., J. Pharm. Pharmacol., 1988, 40, 252).

[0899] Various fatty acids and their derivatives which act as penetration enhancers include, for example, oleic acid, lauric acid, capric acid (n-decanoic acid), myristic acid, palmitic acid, stearic acid, linoleic acid, linolenic acid, dicaprate, tricaprate, monoolein (1-monooleoyl-rac-glycerol), dilaurin, caprylic acid, arachidonic acid, glycerol 1-monocaprate, 1-dodecylazacycloheptan-2-one, acylcarnitines, acylcholines, C₁₋₂₀ alkyl esters thereof (e.g., methyl, isopropyl and t-butyl), and mono- and di-glycerides thereof (i.e., oleate, laurate, caprate, myristate, palmitate, stearate, linoleate, etc.) (see e.g., Touitou, E., et al. Enhancement in Drug Delivery, CRC Press, Danvers, M A, 2006; Lee et al., Critical Reviews in Therapeutic Drug Carrier Systems, 1991, p. 92; Muranishi, Critical Reviews in Therapeutic Drug Carrier Systems, 1990, 7, 1-33; El Hariri et al., J. Pharm. Pharmacol., 1992, 44, 651-654).

[0900] The physiological role of bile includes the facilitation of dispersion and absorption of lipids and fat-soluble vitamins (see e.g., Malmsten, M. Surfactants and polymers in drug delivery, Informa Health Care, New York, NY, 2002; Brunton, Chapter 38 in: Goodman & Gilman's The Pharmacological Basis of Therapeutics, 9th Ed., Hardman et al. Eds., McGraw-Hill, New York, 1996, pp. 934-935). Various natural bile salts, and their synthetic derivatives, act as penetration enhancers. Thus the term “bile salts” includes any of the naturally occurring components of bile as well as any of their synthetic derivatives. Suitable bile salts include, for example, cholic acid (or its pharmaceutically acceptable sodium salt, sodium cholate), dehydrocholic acid (sodium dehydrocholate), deoxycholic acid (sodium deoxycholate), glucholic acid (sodium glucholate), glycholic acid (sodium glycocholate), glycodeoxycholic acid (sodium glycodeoxycholate), taurocholic acid (sodium taurocholate), taurodeoxycholic acid (sodium taurodeoxycholate), chenodeoxycholic acid (sodium chenodeoxycholate), ursodeoxycholic acid (UDCA), sodium tauro-24,25-dihydro-fusidate (STDHF), sodium glycodihydrofusidate and polyoxyethylene-9-lauryl ether (POE) (see e.g., Malmsten, M. Surfactants and polymers in drug delivery, Informa Health Care, New York, NY, 2002; Lee et al., Critical Reviews in Therapeutic Drug Carrier Systems, 1991, page 92; Swinyard, Chapter 39 In: Remington's Pharmaceutical Sciences, 18th Ed., Gennaro, ed., Mack Publishing Co., Easton, Pa., 1990, pages 782-783; Muranishi, Critical Reviews in Therapeutic Drug Carrier Systems, 1990, 7, 1-33; Yamamoto et al., J. Pharm. Exp. Ther., 1992, 263, 25; Yamashita et al., J. Pharm. Sci., 1990, 79, 579-583).

[0901] Chelating agents, as used in connection with the present disclosure, can be defined as compounds that remove metallic ions from solution by forming complexes therewith, with the result that absorption of RNAi agents through the mucosa is enhanced. With regards to their use as penetration enhancers in the present disclosure, chelating agents have the added advantage of also serving as DNase inhibitors, as most characterized DNA nucleases require a divalent metal ion for catalysis and are thus inhibited by chelating agents (Jarrett, J. Chromatogr., 1993, 618, 315-339). Suitable chelating agents include but are not limited to disodium ethylenediaminetetraacetate (EDTA), citric acid, salicylates (e.g., sodium salicylate, 5-methoxysalicylate and homovanilate), N-acyl derivatives of collagen, laureth-9 and N-amino acyl derivatives of beta-diketones (enamines)(see e.g., Katdare, A. et al., Excipient development for pharmaceutical, biotechnology, and drug delivery, CRC Press, Danvers, M A, 2006; Lee et al., Critical Reviews in Therapeutic Drug Carrier Systems, 1991, page 92; Muranishi, Critical Reviews in Therapeutic Drug Carrier Systems, 1990, 7, 1-33; Buur et al., J. Control Rel., 1990, 14, 43-51).

[0902] As used herein, non-chelating non-surfactant penetration enhancing compounds can be defined as compounds that demonstrate insignificant activity as chelating agents or as surfactants but that nonetheless enhance absorption of RNAi agents through the alimentary mucosa (see e.g., Muranishi, Critical Reviews in Therapeutic Drug Carrier Systems, 1990, 7, 1-33). This class of penetration enhancers includes, for example, unsaturated cyclic ureas, 1-alkyl- and 1-alkenylazacyclo-alkanone derivatives (Lee et al., Critical Reviews in Therapeutic Drug Carrier Systems, 1991, page 92); and non-steroidal anti-inflammatory agents such as diclofenac sodium, indomethacin and phenylbutazone (Yamashita et al., J. Pharm. Pharmacol., 1987, 39, 621-626).

[0903] Agents that enhance uptake of RNAi agents at the cellular level can also be added to the pharmaceutical and other compositions of the present disclosure. For example, cationic lipids, such as lipofectin (Junichi et al, U.S. Pat. No. 5,705,188), cationic glycerol derivatives, and polycationic molecules, such as polylysine (WO 97/30731), are also known to enhance the cellular uptake of dsRNAs.

[0904] Other agents can be utilized to enhance the penetration of the administered nucleic acids, including glycols such as ethylene glycol and propylene glycol, pyrrols such as 2-pyrrol, azones, and terpenes such as limonene and menthone.

[0905] vi. Excipients

[0906] In contrast to a carrier compound, a “pharmaceutical carrier” or “excipient” is a pharmaceutically acceptable solvent, suspending agent or any other pharmacologically inert vehicle for delivering one or more nucleic acids to an animal. The excipient can be liquid or solid and is selected, with the planned manner of administration in mind, so as to provide for the desired bulk, consistency, etc., when combined with a nucleic acid and the other components of a given pharmaceutical composition. Typical pharmaceutical carriers include, but are not limited to, binding agents (e.g., pregelatinized maize starch, polyvinylpyrrolidone or hydroxypropyl methylcellulose, etc.); fillers (e.g., lactose and other sugars, microcrystalline cellulose, pectin, gelatin, calcium sulfate, ethyl cellulose, polyacrylates or calcium hydrogen phosphate, etc.); lubricants (e.g., magnesium stearate, talc, silica, colloidal silicon dioxide, stearic acid, metallic stearates, hydrogenated vegetable oils, corn starch, polyethylene glycols, sodium benzoate, sodium acetate, etc.); disintegrants (e.g., starch, sodium starch glycolate, etc.); and wetting agents (e.g., sodium lauryl sulphate, etc).

[0907] Pharmaceutically acceptable organic or inorganic excipients suitable for non-parenteral administration which do not deleteriously react with nucleic acids can also be used to formulate the compositions of the present disclosure. Suitable pharmaceutically acceptable carriers include, but are not limited to, water, salt solutions, alcohols, polyethylene glycols, gelatin, lactose, amylose, magnesium stearate, talc, silicic acid, viscous paraffin, hydroxymethylcellulose, polyvinylpyrrolidone and the like.

[0908] Formulations for topical administration of nucleic acids can include sterile and non-sterile aqueous solutions, non-aqueous solutions in common solvents such as alcohols, or solutions of the nucleic acids in liquid or solid oil bases. The solutions can also contain buffers, diluents and other suitable additives. Pharmaceutically acceptable organic or inorganic excipients suitable for non-parenteral administration which do not deleteriously react with nucleic acids can be used.

[0909] Suitable pharmaceutically acceptable excipients include, but are not limited to, water, salt solutions, alcohol, polyethylene glycols, gelatin, lactose, amylose, magnesium stearate, talc, silicic acid, viscous paraffin, hydroxymethylcellulose, polyvinylpyrrolidone and the like.

[0910] vii. Other Components

[0911] The compositions of the present disclosure can additionally contain other adjunct components conventionally found in pharmaceutical compositions, at their art-established usage levels. Thus, for example, the compositions can contain additional, compatible, pharmaceutically-active materials such as, for example, antipruritics, astringents, local anesthetics or anti-inflammatory agents, or can contain additional materials useful in physically formulating various dosage forms of the compositions of the present disclosure, such as dyes, flavoring agents, preservatives, antioxidants, opacifiers, thickening agents and stabilizers. However, such materials, when added, should not unduly interfere with the biological activities of the components of the compositions of the present disclosure. The formulations can be sterilized and, if desired, mixed with auxiliary agents, e.g., lubricants, preservatives, stabilizers, wetting agents, emulsifiers, salts for influencing osmotic pressure, buffers, colorings, flavorings or aromatic substances and the like which do not deleteriously interact with the nucleic acid(s) of the formulation.

[0912] Aqueous suspensions can contain substances which increase the viscosity of the suspension including, for example, sodium carboxymethylcellulose, sorbitol or dextran. The suspension can also contain stabilizers.

[0913] In some embodiments, pharmaceutical compositions featured in the disclosure include (a) one or more RNAi agents and (b) one or more agents which function by a non-RNAi mechanism and which are useful in treating a SOD1-associated neurodegenerative disorder. Examples of such agents include, but are not limited to SSRIs, venlafaxine, bupropion, and atypical antipsychotics.

[0914] Toxicity and therapeutic efficacy of such compounds can be determined by standard pharmaceutical procedures in cell cultures or experimental animals, e.g., for determining the LD₅₀ (the dose lethal to 50% of the population) and the ED₅₀ (the dose therapeutically effective in 50% of the population). The dose ratio between toxic and therapeutic effects is the therapeutic index and it can be expressed as the ratio LD₅₀/ED₅₀. Compounds that exhibit high therapeutic indices are preferred.

[0915] The data obtained from cell culture assays and animal studies can be used in formulating a range of dosage for use in humans. The dosage of compositions featured herein in the disclosure lies generally within a range of circulating concentrations that include the ED₅₀ with little or no toxicity. The dosage can vary within this range depending upon the dosage form employed and the route of administration utilized. For any compound used in the methods featured in the disclosure, the therapeutically effective dose can be estimated initially from cell culture assays. A dose can be formulated in animal models to achieve a circulating plasma concentration range of the compound or, when appropriate, of the polypeptide product of a target sequence (e.g., achieving a decreased concentration of the polypeptide) that includes the IC₅₀ (i.e., the concentration of the test compound which achieves a half-maximal inhibition of symptoms) as determined in cell culture. Such information can be used to more accurately determine useful doses in humans. Levels in plasma can be measured, for example, by high performance liquid chromatography.

[0916] In addition to their administration, as discussed above, the RNAi agents featured in the disclosure can be administered in combination with other known agents effective in treatment of pathological processes mediated by nucleotide repeat expression. In any event, the administering physician can adjust the amount and timing of RNAi agent administration on the basis of results observed using standard measures of efficacy known in the art or described herein.

### VIII. Kits

[0917] In certain aspects, the instant disclosure provides kits that include a suitable container containing a pharmaceutical formulation of a siRNA compound, e.g., a double-stranded siRNA compound, or siRNA compound, (e.g., a precursor, e.g., a larger siRNA compound which can be processed into a siRNA compound, or a DNA which encodes an siRNA compound, e.g., a double-stranded siRNA compound, or siRNA compound, or precursor thereof). In certain embodiments the individual components of the pharmaceutical formulation may be provided in one container. Alternatively, it may be desirable to provide the components of the pharmaceutical formulation separately in two or more containers, e.g., one container for a siRNA compound preparation, and at least another for a carrier compound. The kit may be packaged in a number of different configurations such as one or more containers in a single box. The different components can be combined, e.g., according to instructions provided with the kit. The components can be combined according to a method described herein, e.g., to prepare and administer a pharmaceutical composition. The kit can also include a delivery device.

### IX. Methods for Inhibiting SOD1 Expression

[0918] The present disclosure also provides methods of inhibiting expression of a SOD1 gene in a cell. The methods include contacting a cell with an RNAi agent, e.g., double stranded RNAi agent, in an amount effective to inhibit expression of SOD1 in the cell, thereby inhibiting expression of SOD1 in the cell. In certain embodiments of the disclosure, SOD1 is inhibited preferentially in CNS (e.g., brain) cells. In other embodiments of the disclosure, SOD1 is inhibited preferentially in the liver (e.g., hepatocytes). In certain embodiments of the disclosure, SOD1 is inhibited in CNS (e.g., brain) cells and in liver (e.g., hepatocytes) cells.

[0919] Contacting of a cell with a RNAi agent, e.g., a double stranded RNAi agent, may be done in vitro or in vivo. Contacting a cell in vivo with the RNAi agent includes contacting a cell or group of cells within a subject, e.g., a human subject, with the RNAi agent. Combinations of in vitro and in vivo methods of contacting a cell are also possible.

[0920] Contacting a cell may be direct or indirect, as discussed above. Furthermore, contacting a cell may be accomplished via a targeting ligand, including any ligand described herein or known in the art. In some embodiments, the targeting ligand is a carbohydrate moiety, e.g., a GalNAc ligand, or any other ligand that directs the RNAi agent to a site of interest.

[0921] The term “inhibiting,” as used herein, is used interchangeably with “reducing,” “silencing,” “downregulating,” “suppressing” and other similar terms, and includes any level of inhibition. In certain embodiments, a level of inhibition, e.g., for an RNAi agent of the instant disclosure, can be assessed in cell culture conditions, e.g., wherein cells in cell culture are transfected via Lipofectamine™-mediated transfection at a concentration in the vicinity of a cell of 10 nM or less, 1 nM or less, etc. Knockdown of a given RNAi agent can be determined via comparison of pre-treated levels in cell culture versus post-treated levels in cell culture, optionally also comparing against cells treated in parallel with a scrambled or other form of control RNAi agent. Knockdown in cell culture of, e.g., preferably 50% or more, can thereby be identified as indicative of “inhibiting” or “reducing”, “downregulating” or “suppressing”, etc. having occurred. It is expressly contemplated that assessment of targeted mRNA or encoded protein levels (and therefore an extent of “inhibiting”, etc. caused by a RNAi agent of the disclosure) can also be assessed in in vivo systems for the RNAi agents of the instant disclosure, under properly controlled conditions as described in the art.

[0922] The phrase “inhibiting expression of a SOD1 gene” or “inhibiting expression of SOD1,” as used herein, includes inhibition of expression of any SOD1 gene (such as, e.g., a mouse SOD1 gene, a rat SOD1 gene, a monkey SOD1 gene, or a human SOD1 gene) as well as variants or mutants of a SOD1 gene that encode a SOD1 protein. Thus, the SOD1 gene may be a wild-type SOD1 gene, a mutant SOD1 gene, or a transgenic SOD1 gene in the context of a genetically manipulated cell, group of cells, or organism.

[0923] “Inhibiting expression of a SOD1 gene” includes any level of inhibition of a SOD1 gene, e.g., at least partial suppression of the expression of a SOD1 gene, such as an inhibition by at least 20%. In certain embodiments, inhibition is by at least 30%, at least 40%, preferably at least 50%, at least about 60%, at least 70%, at least about 80%, at least 85%, at least 90%, at least 95%, at least 96%, at least 97%, at least 98%, or at least 99%; or to below the level of detection of the assay method. In a preferred method, inhibition is measured at a 10 nM concentration of the siRNA using the luciferase assay provided in Example 1.

[0924] The expression of a SOD1 gene may be assessed based on the level of any variable associated with SOD1 gene expression, e.g., SOD1 mRNA level or SOD1 protein level, or, for example, the level of neuroinflammation, e.g., microglial and astrocyte activation, and SOD1 deposition in areas of the brain associated with neuronal cell death.

[0925] Inhibition may be assessed by a decrease in an absolute or relative level of one or more of these variables compared with a control level. The control level may be any type of control level that is utilized in the art, e.g., a pre-dose baseline level, or a level determined from a similar subject, cell, or sample that is untreated or treated with a control (such as, e.g., buffer only control or inactive agent control).

[0926] In some embodiments of the methods of the disclosure, expression of a SOD1 gene is inhibited by at least 20%, 30%, 40%, preferably at least 50%, 60%, 70%, 80%, 85%, 90%, or 95%, or to below the level of detection of the assay. In certain embodiments, the methods include a clinically relevant inhibition of expression of SOD1, e.g. as demonstrated by a clinically relevant outcome after treatment of a subject with an agent to reduce the expression of SOD1.

[0927] Inhibition of the expression of a SOD1 gene may be manifested by a reduction of the amount of mRNA expressed by a first cell or group of cells (such cells may be present, for example, in a sample derived from a subject) in which a SOD1 gene is transcribed and which has or have been treated (e.g., by contacting the cell or cells with a RNAi agent of the disclosure, or by administering a RNAi agent of the disclosure to a subject in which the cells are or were present) such that the expression of a SOD1 gene is inhibited, as compared to a second cell or group of cells substantially identical to the first cell or group of cells but which has not or have not been so treated (control cell(s) not treated with a RNAi agent or not treated with a RNAi agent targeted to the gene of interest). The degree of inhibition may be expressed in terms of:

$$\\ \frac{( mRNA in control cells ) - ( mRNA in treated cells )}{( mRNA in control cells )} \cdot 100 \%$$

[0928] In other embodiments, inhibition of the expression of a SOD1 gene may be assessed in terms of a reduction of a parameter that is functionally linked to a SOD1 gene expression, e.g., SOD1 protein expression. SOD1 gene silencing may be determined in any cell expressing SOD1, either endogenous or heterologous from an expression construct, and by any assay known in the art.

[0929] Inhibition of the expression of a SOD1 protein may be manifested by a reduction in the level of the SOD1 protein that is expressed by a cell or group of cells (e.g., the level of protein expressed in a sample derived from a subject). As explained above, for the assessment of mRNA suppression, the inhibition of protein expression levels in a treated cell or group of cells may similarly be expressed as a percentage of the level of protein in a control cell or group of cells.

[0930] A control cell or group of cells that may be used to assess the inhibition of the expression of a SOD1 gene includes a cell or group of cells that has not yet been contacted with an RNAi agent of the disclosure. For example, the control cell or group of cells may be derived from an individual subject (e.g., a human or animal subject) prior to treatment of the subject with an RNAi agent.

[0931] The level of SOD1 mRNA that is expressed by a cell or group of cells may be determined using any method known in the art for assessing mRNA expression. In one embodiment, the level of expression of SOD1 in a sample is determined by detecting a transcribed polynucleotide, or portion thereof, e.g., mRNA of the SOD1 gene. RNA may be extracted from cells using RNA extraction techniques including, for example, using acid phenol/guanidine isothiocyanate extraction (RNAzol B; Biogenesis), RNeasy™ RNA preparation kits (Qiagen®) or PAXgene (PreAnalytix, Switzerland). Typical assay formats utilizing ribonucleic acid hybridization include nuclear run-on assays, RT-PCR, RNase protection assays, northern blotting, in situ hybridization, and microarray analysis. Circulating SOD1 mRNA may be detected using methods the described in WO2012/177906, the entire contents of which are hereby incorporated herein by reference.

[0932] In some embodiments, the level of expression of SOD1 is determined using a nucleic acid probe. The term “probe”, as used herein, refers to any molecule that is capable of selectively binding to a specific SOD1 nucleic acid or protein, or fragment thereof. Probes can be synthesized by one of skill in the art, or derived from appropriate biological preparations. Probes may be specifically designed to be labeled. Examples of molecules that can be utilized as probes include, but are not limited to, RNA, DNA, proteins, antibodies, and organic molecules.

[0933] Isolated mRNA can be used in hybridization or amplification assays that include, but are not limited to, Southern or northern analyses, polymerase chain reaction (PCR) analyses and probe arrays. One method for the determination of mRNA levels involves contacting the isolated mRNA with a nucleic acid molecule (probe) that can hybridize to SOD1 mRNA. In one embodiment, the mRNA is immobilized on a solid surface and contacted with a probe, for example by running the isolated mRNA on an agarose gel and transferring the mRNA from the gel to a membrane, such as nitrocellulose. In an alternative embodiment, the probe(s) are immobilized on a solid surface and the mRNA is contacted with the probe(s), for example, in an Affymetrix® gene chip array. A skilled artisan can readily adapt known mRNA detection methods for use in determining the level of SOD1 mRNA.

[0934] An alternative method for determining the level of expression of SOD1 in a sample involves the process of nucleic acid amplification or reverse transcriptase (to prepare cDNA) of for example mRNA in the sample, e.g., by RT-PCR (the experimental embodiment set forth in Mullis, 1987, U.S. Pat. No. 4,683,202), ligase chain reaction (Barany (1991) Proc. Natl. Acad. Sci. USA 88:189-193), self sustained sequence replication (Guatelli et al. (1990) Proc. Natl. Acad. Sci. USA 87:1874-1878), transcriptional amplification system (Kwoh et al. (1989) Proc. Natl. Acad. Sci. USA 86:1173-1177), Q-Beta Replicase (Lizardi et al. (1988) Bio/Technology 6:1197), rolling circle replication (Lizardi et al., U.S. Pat. No. 5,854,033) or any other nucleic acid amplification method, followed by the detection of the amplified molecules using techniques well known to those of skill in the art. These detection schemes are especially useful for the detection of nucleic acid molecules if such molecules are present in very low numbers. In particular aspects of the disclosure, the level of expression of SOD1 is determined by quantitative fluorogenic RT-PCR (i.e., the TaqMan™ System), by a Dual-Glo® Luciferase assay, or by other art-recognized method for measurement of SOD1 expression or mRNA level.

[0935] The expression level of SOD1 mRNA may be monitored using a membrane blot (such as used in hybridization analysis such as northern, Southern, dot, and the like), or microwells, sample tubes, gels, beads or fibers (or any solid support comprising bound nucleic acids). See U.S. Pat. Nos. 5,770,722, 5,874,219, 5,744,305, 5,677,195 and 5,445,934, which are incorporated herein by reference. The determination of SOD1 expression level may also comprise using nucleic acid probes in solution.

[0936] In some embodiments, the level of mRNA expression is assessed using branched DNA (bDNA) assays or real time PCR (qPCR). The use of this PCR method is described and exemplified in the Examples presented herein. Such methods can also be used for the detection of SOD1 nucleic acids.

[0937] The level of SOD1 protein expression may be determined using any method known in the art for the measurement of protein levels. Such methods include, for example, electrophoresis, capillary electrophoresis, high performance liquid chromatography (HPLC), thin layer chromatography (TLC), hyperdiffusion chromatography, fluid or gel precipitin reactions, absorption spectroscopy, a colorimetric assays, spectrophotometric assays, flow cytometry, immunodiffusion (single or double), immunoelectrophoresis, western blotting, radioimmunoassay (RIA), enzyme-linked immunosorbent assays (ELISAs), immunofluorescent assays, electrochemiluminescence assays, and the like. Such assays can also be used for the detection of proteins indicative of the presence or replication of SOD1 proteins.

[0938] In some embodiments, the efficacy of the methods of the disclosure in the treatment of a SOD1-related disease is assessed by a decrease in SOD1 mRNA level (e.g, by assessment of a CSF sample for SOD1 level, by brain biopsy, or otherwise).

[0939] In some embodiments, the efficacy of the methods of the disclosure in the treatment of a SOD1-related disease is assessed by a decrease in SOD1 mRNA level (e.g, by assessment of a liver sample for SOD1 level, by biopsy, or otherwise).

[0940] In some embodiments of the methods of the disclosure, the RNAi agent is administered to a subject such that the RNAi agent is delivered to a specific site within the subject. The inhibition of expression of SOD1 may be assessed using measurements of the level or change in the level of SOD1 mRNA or SOD1 protein in a sample derived from a specific site within the subject, e.g., CNS cells. In certain embodiments, the methods include a clinically relevant inhibition of expression of SOD1, e.g. as demonstrated by a clinically relevant outcome after treatment of a subject with an agent to reduce the expression of SOD1.

[0941] As used herein, the terms detecting or determining a level of an analyte are understood to mean performing the steps to determine if a material, e.g., protein, RNA, is present. As used herein, methods of detecting or determining include detection or determination of an analyte level that is below the level of detection for the method used.

### X. Methods of Treating or Preventing SOD1-Associated Neurodegenerative Diseases

[0942] The present disclosure also provides methods of using a RNAi agent of the disclosure or a composition containing a RNAi agent of the disclosure to reduce or inhibit SOD1 expression in a cell. The methods include contacting the cell with a dsRNA of the disclosure and maintaining the cell for a time sufficient to obtain degradation of the mRNA transcript of a SOD1 gene, thereby inhibiting expression of the SOD1 gene in the cell. Reduction in gene expression can be assessed by any methods known in the art. For example, a reduction in the expression of SOD1 may be determined by determining the mRNA expression level of SOD1 using methods routine to one of ordinary skill in the art, e.g., northern blotting, qRT-PCR; by determining the protein level of SOD1 using methods routine to one of ordinary skill in the art, such as western blotting, immunological techniques.

[0943] In the methods of the disclosure the cell may be contacted in vitro or in vivo, i.e., the cell may be within a subject.

[0944] A cell suitable for treatment using the methods of the disclosure may be any cell that expresses a SOD1 gene. A cell suitable for use in the methods of the disclosure may be a mammalian cell, e.g., a primate cell (such as a human cell or a non-human primate cell, e.g., a monkey cell or a chimpanzee cell), a non-primate cell (such as a rat cell, or a mouse cell. In one embodiment, the cell is a human cell, e.g., a human CNS cell. In one embodiment, the cell is a human cell, e.g., a human liver cell. In one embodiment, the cell is a human cell, e.g., a human CNS cell and a human liver cell.

[0945] SOD1 expression is inhibited in the cell by at least about 30, 40, 50, 55, 60, 65, 70, 75, 80, 85, 90, 95, 96, 97, 98, 99, or about 100%, i.e., to below the level of detection. In preferred embodiments, SOD1 expression is inhibited by at least 50%.

[0946] The in vivo methods of the disclosure may include administering to a subject a composition containing a RNAi agent, where the RNAi agent includes a nucleotide sequence that is complementary to at least a part of an RNA transcript of the SOD1 gene of the mammal to be treated. When the organism to be treated is a mammal such as a human, the composition can be administered by any means known in the art including, but not limited to oral, intraperitoneal, or parenteral routes, including intracranial (e.g., intraventricular (also referred to as intracerebroventricular), intraparenchymal, and intrathecal), intravenous, intramuscular, subcutaneous, transdermal, rectal, and topical (including buccal and sublingual) administration. In certain embodiments, the compositions are administered by intravenous infusion or injection. In certain embodiments, the compositions are administered by subcutaneous injection. In certain embodiments, the compositions are administered by intrathecal injection. In certain embodiments, the compositions are administered by intracerebroventricular injection.

[0947] In some embodiments, the administration is via a depot injection. A depot injection may release the RNAi agent in a consistent way over a prolonged time period. Thus, a depot injection may reduce the frequency of dosing needed to obtain a desired effect, e.g., a desired inhibition of SOD1, or a therapeutic or prophylactic effect. A depot injection may also provide more consistent serum concentrations. Depot injections may include subcutaneous injections or intramuscular injections. In preferred embodiments, the depot injection is a subcutaneous injection.

[0948] In some embodiments, the administration is via a pump. The pump may be an external pump or a surgically implanted pump. In certain embodiments, the pump is a subcutaneously implanted osmotic pump. In other embodiments, the pump is an infusion pump. An infusion pump may be used for intracranial, intravenous, subcutaneous, arterial, or epidural infusions. In preferred embodiments, the infusion pump is a subcutaneous infusion pump. In other embodiments, the pump is a surgically implanted pump that delivers the RNAi agent to the CNS.

[0949] The mode of administration may be chosen based upon whether local or systemic treatment is desired and based upon the area to be treated. The route and site of administration may be chosen to enhance targeting.

[0950] In one aspect, the present disclosure also provides methods for inhibiting the expression of a SOD1 gene in a mammal. The methods include administering to the mammal a composition comprising a dsRNA that targets a SOD1 gene in a cell of the mammal and maintaining the mammal for a time sufficient to obtain degradation of the mRNA transcript of the SOD1 gene, thereby inhibiting expression of the SOD1 gene in the cell. Reduction in gene expression can be assessed by any methods known it the art and by methods, e.g. qRT-PCR, described herein. Reduction in protein production can be assessed by any methods known it the art and by methods, e.g. ELISA, described herein. In one embodiment, a CNS biopsy sample or a cerebrospinal fluid (CSF) sample serves as the tissue material for monitoring the reduction in SOD1 gene or protein expression (or of a proxy therefore).

[0951] The present disclosure further provides methods of treatment of a subject in need thereof. The treatment methods of the disclosure include administering an RNAi agent of the disclosure to a subject, e.g., a subject that would benefit from inhibition of SOD1 expression, in a therapeutically effective amount of a RNAi agent targeting a SOD1 gene or a pharmaceutical composition comprising a RNAi agent targeting a SOD1 gene.

[0952] In addition, the present disclosure provides methods of preventing, treating or inhibiting the progression of a SOD1-associated neurodegenerative disease or disorder, such as Amyotrophic Lateral Sclerosis (ALS), Alzheimer's disease (AD), Parkinson's disease (PD), and Down's syndrome (DS).

[0953] The methods include administering to the subject a therapeutically effective amount of any of the RNAi agent, e.g., dsRNA agents, or the pharmaceutical composition provided herein, thereby preventing, treating, or inhibiting the progression of the SOD1-associated neurodegenerative disease or disorder in the subject.

[0954] An RNAi agent of the disclosure may be administered as a “free RNAi agent.” A free RNAi agent is administered in the absence of a pharmaceutical composition. The naked RNAi agent may be in a suitable buffer solution. The buffer solution may comprise acetate, citrate, prolamine, carbonate, or phosphate, or any combination thereof. In one embodiment, the buffer solution is phosphate buffered saline (PBS). The pH and osmolarity of the buffer solution containing the RNAi agent can be adjusted such that it is suitable for administering to a subject.

[0955] Alternatively, an RNAi agent of the disclosure may be administered as a pharmaceutical composition, such as a dsRNA liposomal formulation.

[0956] Subjects that would benefit from a reduction or inhibition of SOD1 gene expression are those having a SOD1-associated neurodegenerative disease.

[0957] The disclosure further provides methods for the use of a RNAi agent or a pharmaceutical composition thereof, e.g., for treating a subject that would benefit from reduction or inhibition of SOD1 expression, e.g., a subject having a SOD1-associated neurodegenerative disorder, in combination with other pharmaceuticals or other therapeutic methods, e.g., with known pharmaceuticals or known therapeutic methods, such as, for example, those which are currently employed for treating these disorders. For example, in certain embodiments, an RNAi agent targeting SOD1 is administered in combination with, e.g., an agent useful in treating a SOD1-associated neurodegenerative disorder as described elsewhere herein or as otherwise known in the art. For example, additional agents and treatments suitable for treating a subject that would benefit from reduction in SOD1 expression, e.g., a subject having a SOD1-associated neurodegenerative disorder, may include agents currently used to treat symptoms of SOD1. The RNAi agent and additional therapeutic agents may be administered at the same time or in the same combination, e.g., intrathecally, or the additional therapeutic agent can be administered as part of a separate composition or at separate times or by another method known in the art or described herein. The RNAi agent and additional therapeutic agents may be administered at the same time or in the same combination or the additional therapeutic agent can be administered as part of a separate composition or at separate times or by another method known in the art or described herein.

[0958] Exemplary additional therapeutics and treatments include, for example, sedatives, antidepressants, clonazepam, sodium valproate, opiates, antiepileptic drugs, cholinesterase inhibitors, memantine, benzodiazepines, levodopa, COMT inhibitors (e.g., tolcapone and entacapone), dopamine agonists (e.g., bromocriptine, pergolide, pramipexole, ropinirole, piribedil, cabergoline, apomorphine and lisuride), MAO-B inhibitors (e.g., safinamide, selegiline and rasagiline), amantadine, an anticholinergic, modafinil, pimavanserin, doxepin, rasagline, an antipsychotic, an atypical antipsychotic (e.g., amisulpride, olanzapine, risperidone, and clozapine), riluzole, edaravone, deep brain stimulation, non-invasive ventilation (NIV), invasive ventilation physical therapy, occupational therapy, speech therapy, dietary changes and swallowing technique a feeding tube, a PEG tube, probiotics, and psychological therapy.

[0959] In one embodiment, the method includes administering a composition featured herein such that expression of the target SOD1 gene is decreased, for at least one month. In preferred embodiments, expression is decreased for at least 2 months, or 6 months.

[0960] Preferably, the RNAi agents useful for the methods and compositions featured herein specifically target RNAs (primary or processed) of the target SOD1 gene. Compositions and methods for inhibiting the expression of these genes using RNAi agents can be prepared and performed as described herein.

[0961] Administration of the dsRNA according to the methods of the disclosure may result in a reduction of the severity, signs, symptoms, or markers of such diseases or disorders in a patient with a SOD1-associated neurodegenerative disorder. By “reduction” in this context is meant a statistically significant or clinically significant decrease in such level. The reduction can be, for example, at least 5%, 10%, 15%, 20%, 25%, 30%, 35%, 40%, 45%, 50%, 55%, 60%, 65%, 70%, 75%, 80%, 85%, 90%, 95%, or about 100%.

[0962] Efficacy of treatment or prevention of disease can be assessed, for example by measuring disease progression, disease remission, symptom severity, reduction in pain, quality of life, dose of a medication required to sustain a treatment effect, level of a disease marker or any other measurable parameter appropriate for a given disease being treated or targeted for prevention. It is well within the ability of one skilled in the art to monitor efficacy of treatment or prevention by measuring any one of such parameters, or any combination of parameters. For example, efficacy of treatment of a SOD1-associated neurodegenerative disorder may be assessed, for example, by periodic monitoring of a subject's cognition, learning, or memory. Comparisons of the later readings with the initial readings provide a physician an indication of whether the treatment is effective. It is well within the ability of one skilled in the art to monitor efficacy of treatment or prevention by measuring any one of such parameters, or any combination of parameters. In connection with the administration of a RNAi agent targeting SOD1 or pharmaceutical composition thereof, “effective against” a SOD1-associated neurodegenerative disorder indicates that administration in a clinically appropriate manner results in a beneficial effect for at least a statistically significant fraction of patients, such as an improvement of symptoms, a cure, a reduction in disease, extension of life, improvement in quality of life, or other effect generally recognized as positive by medical doctors familiar with treating SOD1-associated neurodegenerative disorders and the related causes.

[0963] A treatment or preventive effect is evident when there is a statistically significant improvement in one or more parameters of disease status, or by a failure to worsen or to develop symptoms where they would otherwise be anticipated. As an example, a favorable change of at least 10% in a measurable parameter of disease, and preferably at least 20%, 30%, 40%, 50%, or more can be indicative of effective treatment. Efficacy for a given RNAi agent drug or formulation of that drug can also be judged using an experimental animal model for the given disease as known in the art. When using an experimental animal model, efficacy of treatment is evidenced when a statistically significant reduction in a marker or symptom is observed.

[0964] Alternatively, the efficacy can be measured by a reduction in the severity of disease as determined by one skilled in the art of diagnosis based on a clinically accepted disease severity grading scale. Any positive change resulting in e.g., lessening of severity of disease measured using the appropriate scale, represents adequate treatment using a RNAi agent or RNAi agent formulation as described herein.

[0965] Subjects can be administered a therapeutic amount of dsRNA, such as about 0.01 mg/kg to about 200 mg/kg.

[0966] The RNAi agent can be administered intrathecally, intraventricularly, or by intravenous infusion over a period of time, on a regular basis. In certain embodiments, after an initial treatment regimen, the treatments can be administered on a less frequent basis. Administration of the RNAi agent can reduce SOD1 levels, e.g., in a cell, tissue, blood, CSF sample or other compartment of the patient by at least 20%, 30%, 40%, 50%, 55%, 60%, 65%, 70,% 75%, 80%, 85%, 90%, 95%, 96%, 97%, 98%, or at least about 99% or more. In a preferred embodiment, administration of the RNAi agent can reduce SOD1 levels, e.g., in a cell, tissue, blood, CSF sample or other compartment of the patient by at least 50%.

[0967] Before administration of a full dose of the RNAi agent, patients can be administered a smaller dose, such as a 5% infusion reaction, and monitored for adverse effects, such as an allergic reaction. In another example, the patient can be monitored for unwanted immunostimulatory effects, such as increased cytokine (e.g., TNF-alpha or INF-alpha) levels.

[0968] Alternatively, the RNAi agent can be administered subcutaneously, i.e., by subcutaneous injection.

[0969] One or more injections may be used to deliver the desired, e.g., monthly dose of RNAi agent to a subject. The injections may be repeated over a period of time. The administration may be repeated on a regular basis. In certain embodiments, after an initial treatment regimen, the treatments can be administered on a less frequent basis. A repeat-dose regimen may include administration of a therapeutic amount of RNAi agent on a regular basis, such as monthly or extending to once a quarter, twice per year, once per year. In certain embodiments, the RNAi agent is administered about once per month to about once per quarter (i.e., about once every three months).

[0970] Unless otherwise defined, all technical and scientific terms used herein have the same meaning as commonly understood by one of ordinary skill in the art to which this invention belongs. Although methods and materials similar or equivalent to those described herein can be used in the practice or testing of the RNAi agents and methods featured in the invention, suitable methods and materials are described below. All publications, patent applications, patents, and other references mentioned herein are incorporated by reference in their entirety. In case of conflict, the present specification, including definitions, will control. In addition, the materials, methods, and examples are illustrative only and not intended to be limiting.

[0971] An informal Sequence Listing is filed herewith and forms part of the specification as filed.

### EXAMPLES

### Example 1. RNAi Agent Design, Synthesis, Selection, and In Vitro Evaluation

[0972] This Example describes methods for the design, synthesis, selection, and in vitro evaluation of SOD1 RNAi agents.

### Source of Reagents

[0973] Where the source of a reagent is not specifically given herein, such reagent can be obtained from any supplier of reagents for molecular biology at a quality/purity standard for application in molecular biology.

### Bioinformatics

[0974] siRNAs targeting the human superoxide dismutase 1 (SOD1) gene (human: NCBI refseqID NM_000454.4; NCBI GeneID: 6647), mouse SOD1 gene (refseqID NM_011434.1; NCBI GeneID: 20655), or Macaca fascicularis SOD1 gene (refseqID NM_001285406.1; NCBI GeneID: 102118687) were designed using custom R and Python scripts. The human NM_000454.4 REFSEQ mRNA has a length of 981 bases; the mouse NM_011434.1 REFSEQ mRNA has a length of 661 bases; and the Macaca fascicularis SOD1 NM_001285406.1 REFSEQ mRNA has a length of 465 bases.

[0975] Detailed lists of the unmodified SOD1 sense and antisense strand nucleotide sequences are shown in Tables 2, 4 and 6. Detailed lists of the modified SOD1 sense and antisense strand nucleotide sequences are shown in Tables 3, 5 and 7.

[0976] It is to be understood that, throughout the application, a duplex name without a decimal is equivalent to a duplex name with a decimal which merely references the batch number of the duplex. For example, AD-266859 is equivalent to AD-266859.1.

siRNA Synthesis

[0977] Briefly, siRNA sequences were synthesized on a 1 μmol scale using a Mermade 192 synthesizer (BioAutomation) with phosphoramidite chemistry on solid supports. The solid support was controlled pore glass (500-1000 Å) loaded with a custom GalNAc ligand (3′-GalNAc conjugates), universal solid support (AM Chemicals), or the first nucleotide of interest. Ancillary synthesis reagents and standard 2-cyanoethyl phosphoramidite monomers (2′-deoxy-2′-fluoro, 2′-O-methyl, RNA, DNA) were obtained from Thermo-Fisher (Milwaukee, WI), Hongene (China), or Chemgenes (Wilmington, MA, USA). Additional phosphoramidite monomers were procured from commercial suppliers, prepared in-house, or procured using custom synthesis from various CMOs. Phosphoramidites were prepared at a concentration of 100 mM in either acetonitrile or 9:1 acetonitrile:DMF and were coupled using 5-Ethylthio-1H-tetrazole (ETT, 0.25 M in acetonitrile) with a reaction time of 400 s. Phosphorothioate linkages were generated using a 100 mM solution of 3-((Dimethylamino-methylidene) amino)-3H-1,2,4-dithiazole-3-thione (DDTT, obtained from Chemgenes (Wilmington, MA, USA)) in anhydrous acetonitrile/pyridine (9:1 v/v). Oxidation time was 5 minutes. All sequences were synthesized with final removal of the DMT group (“DMT-Off”).

[0978] Upon completion of the solid phase synthesis, solid-supported oligoribonucleotides were treated with 300 μL of Methylamine (40% aqueous) at room temperature in 96 well plates for approximately 2 hours to afford cleavage from the solid support and subsequent removal of all additional base-labile protecting groups. For sequences containing any natural ribonucleotide linkages (2′-OH) protected with a tert-butyl dimethyl silyl (TBDMS) group, a second deprotection step was performed using TEA.3HF (triethylamine trihydrofluoride). To each oligonucleotide solution in aqueous methylamine was added 200 μL of dimethyl sulfoxide (DMSO) and 300 μL TEA.3HF and the solution was incubated for approximately 30 mins at 60° C. After incubation, the plate was allowed to come to room temperature and crude oligonucleotides were precipitated by the addition of 1 mL of 9:1 acetontrile:ethanol or 1:1 ethanol:isopropanol. The plates were then centrifuged at 4° C. for 45 mins and the supernatant carefully decanted with the aid of a multichannel pipette. The oligonucleotide pellet was resuspended in 20 mM NaOAc and subsequently desalted using a HiTrap size exclusion column (5 mL, GE Healthcare) on an Agilent LC system equipped with an autosampler, UV detector, conductivity meter, and fraction collector. Desalted samples were collected in 96 well plates and then analyzed by LC-MS and UV spectrometry to confirm identity and quantify the amount of material, respectively.

[0979] Duplexing of single strands was performed on a Tecan liquid handling robot. Sense and antisense single strands were combined in an equimolar ratio to a final concentration of 10 μM in 1×PBS in 96 well plates, the plate sealed, incubated at 100° C. for 10 minutes, and subsequently allowed to return slowly to room temperature over a period of 2-3 hours. The concentration and identity of each duplex was confirmed and then subsequently utilized for in vitro screening assays.

### Cell Culture and Transfections

[0980] Cells were transfected by adding 4.9 μL of Opti-MEM plus 0.1 μL of RNAiMAX per well (Invitrogen, Carlsbad CA. cat #13778-150) to 5 μL of siRNA duplexes per well, with 4 replicates of each siRNA duplex, into a 384-well plate, and incubated at room temperature for 15 minutes. Forty μL of MEDIA containing ˜5×10³ cells were then added to the siRNA mixture. Cells were incubated for 24 hours prior to RNA purification. Experiments were performed at 10 nM and 0.1 nM in primary mouse hepatocytes (PMH) or primary cynomolgus hepatocytes (PCH).

Total RNA Isolation Using DYNABEADS mRNA Isolation Kit

[0981] RNA was isolated using an automated protocol on a BioTek-EL406 platform using DYNABEADs (Invitrogen, cat #61012). Briefly, 70 μL of Lysis/Binding Buffer and 10 μL of lysis buffer containing 3 μL of magnetic beads were added to the plate with cells. Plates were incubated on an electromagnetic shaker for 10 minutes at room temperature and then magnetic beads were captured and the supernatant was removed. Bead-bound RNA were then washed 2 times with 150 μL Wash Buffer A and once with Wash Buffer B. Beads are then washed with 150 μL Elution Buffer, re-captured and supernatant removed.

cDNA Synthesis Using ABI High Capacity cDNA Reverse Transcription Kit (Applied Biosystems, Foster City, CA, Cat #4368813)

[0982] Ten μL of a master mix containing 1 μL 10×Buffer, 0.4 μL 25×dNTPs, 1 μL 10× Random primers, 0.5 μL Reverse Transcriptase, 0.5 μL RNase inhibitor and 6.6 μL of H₂O per reaction was added to RNA isolated above. Plates were sealed, mixed, and incubated on an electromagnetic shaker for 10 minutes at room temperature, followed by 2 hour incubation at 37° C.

### Real Time PCR

[0983] Two μL of cDNA were added to a master mix containing 0.5 μL of human or mouse GAPDH TaqMan Probe (ThermoFisher cat 4352934E or 4351309) and 0.5 μL of appropriate SOD1 probe (commercially available, e.g., from Thermo Fisher) and 5 μL Lightcycler 480 probe master mix (Roche Cat #04887301001) per well in a 384 well plates (Roche cat #04887301001). Real time PCR was done in a LightCycler480 Real Time PCR system (Roche). Each duplex was tested with N=4 and data were normalized to cells transfected with a non-targeting control siRNA. To calculate relative fold change, real time data were analyzed using the ΔΔCt method and normalized to assays performed with cells transfected with a non-targeting control siRNA.

[0984] The results of single dose screens in primary Cynomolgus hepatocytes (PCH) of the duplexes in Tables 2 and 3 are provided in Table 8; the results of the single dose screens in primary mouse hepatocytes (PMH) of the duplexes in Tables 2 and 3 are provided in Table 9; the results of the single dose screens in primary Cynomolgus hepatocytes (PCH) of the duplexes in Tables 4 and 5 are provided in Table 10; and the results of the single dose screens in primary Cynomolgus hepatocytes (PCH) of the duplexes in Tables 6 and 7 are provided in Table 11.

[0985] Table 1. Abbreviations of nucleotide monomers used in nucleic acid sequence representation. It will be understood that these monomers, when present in an oligonucleotide, are mutually linked by 5′-3′-phosphodiester bonds; and it is understood that when the nucleotide contains a 2′-fluoro modification, then the fluoro replaces the hydroxy at that position in the parent nucleotide (i.e., it is a 2′-deoxy-2′-fluoronucleotide).

| Abbre- | |
|---|---|
| via- | |
| tion | Nucleotide(s) |
| A | Adenosine-3′-phosphate |
| Ab | beta-L-adenosine-3′-phosphate |
| Abs | beta-L-adenosine-3′-phosphorothioate |
| Af | 2′-fluoroadenosine-3′-phosphate |
| Afs | 2′-fluoroadenosine-3′-phosphorothioate |
| As | adenosine-3′-phosphorothioate |
| C | cytidine-3′-phosphate |
| Cb | beta-L-cytidine-3′-phosphate |
| Cbs | beta-L-cytidine-3′-phosphorothioate |
| Cf | 2′-fluorocytidine-3′-phosphate |
| Cfs | 2′-fluorocytidine-3′-phosphorothioate |
| Cs | cytidine-3′-phosphorothioate |
| G | guanosine-3′-phosphate |
| Gb | beta-L-guanosine-3′-phosphate |
| Gbs | beta-L-guanosine-3′-phosphorothioate |
| Gf | 2′-fluoroguanosine-3′-phosphate |
| Gfs | 2′-fluoroguanosine-3′-phosphorothioate |
| Gs | guanosine-3′-phosphorothioate |
| T | 5′-methyluridine-3′-phosphate |
| Tf | 2′-fluoro-5-methyluridine-3′-phosphate |
| Tfs | 2′-fluoro-5-methyluridine-3′-phosphorothioate |
| Ts | 5′-methyluridine-3′-phosphorothioate |
| U | Uridine-3′-phosphate |
| Uf | 2′-fluorouridine-3′-phosphate |
| Ufs | 2′-fluorouridine-3′-phosphorothioate |
| Us | uridine-3′-phosphorothioate |
| N | any nucleotide, modified or unmodified |
| a | 2′-O-methyladenosine-3′-phosphate |
| as | 2′-O-methyladenosine-3′-phosphorothioate |
| c | 2′-O-methylcytidine-3′-phosphate |
| cs | 2′-O-methylcytidine-3′-phosphorothioate |
| g | 2′-O-methylguanosine-3′-phosphate |
| gs | 2′-O-methylguanosine-3′-phosphorothioate |
| t | 2′-O-methyl-5-methyluridine-3′-phosphate |
| ts | 2′-O-methyl-5-methyluridine-3′-phosphorothioate |
| u | 2′-O-methyluridine-3′-phosphate |
| us | 2′-O-methyluridine-3′-phosphorothioate |
| s | phosphorothioate linkage |
| L96 | N-[tris(GalNAc-alkyl)-amidodecanoyl)]-4-hydroxyprolinol |
| | (Hyp-(GalNAc-alkyl)3) |
| | [chemical structure] |
| Y34 | 2-hydroxymethyl-tetrahydrofurane-4-methoxy-3-phosphate (abasic 2′-OMe |
| | furanose) |
| | [chemical structure] |
| Y44 | inverted abasic DNA (2-hydroxymethyl-tetrahydrofurane-5-phosphate) |
| | [chemical structure] |
| L10 | N-(cholesterylcarboxamidocaproyl)-4-hydroxyprolinol (Hyp-C6-Chol) |
| | [chemical structure] |
| (Agn) | Adenosine-glycol nucleic acid (GNA) S-Isomer |
| (Cgn) | Cytidine-glycol nucleic acid (GNA) S-Isomer |
| (Ggn) | Guanosine-glycol nucleic acid (GNA) S-Isomer |
| (Tgn) | Thymidine-glycol nucleic acid (GNA) S-Isomer |
| P | Phosphate |
| VP | Vinyl-phosphonate |
| dA | 2′-deoxyadenosine-3′-phosphate |
| dAs | 2′-deoxyadenosine-3′-phosphorothioate |
| dC | 2′-deoxycytidine-3′-phosphate |
| dCs | 2′-deoxycytidine-3′-phosphorothioate |
| dG | 2′-deoxyguanosine-3′-phosphate |
| dGs | 2′-deoxyguanosine-3′-phosphorothioate |
| dT | 2′-deoxythymidine-3′-phosphate |
| dTs | 2′-deoxythymidine-3′-phosphorothioate |
| dU | 2′-deoxyuridine |
| dUs | 2′-deoxyuridine-3′-phosphorothioate |
| (C2p) | cytidine-2′-phosphate |
| (G2p) | guanosine-2′-phosphate |
| (U2p) | uridine-2′-phosphate |
| (A2p) | adenosine-2′-phosphate |
| (Ahd) | 2′-O-hexadecyl-adenosine-3′-phosphate |
| (Ahds) | 2′-O-hexadecyl-adenosine-3′-phosphorothioate |
| (Chd) | 2′-O-hexadecyl-cytidine-3′-phosphate |
| (Chds) | 2′-O-hexadecyl-cytidine-3′-phosphorothioate |
| (Ghd) | 2′-O-hexadecyl-guanosine-3′-phosphate |
| (Ghds) | 2′-O-hexadecyl-guanosine-3′-phosphorothioate |
| (Uhd) | 2′-O-hexadecyl-uridine-3′-phosphate |
| (Uhds) | 2′-O-hexadecyl-uridine-3′-phosphorothioate |
| s | phosphorothioate |

TABLE 2
Unmodified Sense and Antisense Strand Sequences of Superoxide Dismutase 1 dsRNA Agents

| | | | | Range | | | | Range |
|---|---|---|---|---|---|---|---|---|
| | | | | in | | | | in |
| | | SEQ | | Source, | | SEQ | | Source, |
| | | ID | | NM_001 | | ID | | NM_001 |
| Duplex Name | Sense Sequence 5' to 3' | NO: | Source Name | 285406.1 | Antisense Sequence 5' to 3' | NO: | Source Name | 285406.1 |
| AD-266859.1 | AUCAGUUUGGAGAUAAUACAU | 35 | NM_001285406.1_ | 146-166 | AUGUAUUAUCUCCAAACUGAUGA | 118 | NM_001285406.1_ | 144-166 |
| | | | 146-166_C21U_s | | | | 144-166_G1A_as | |
| AD-266997.1 | UCUUUCGAAGAUUCUGUGAUU | 36 | NM_001285406.1_ | 295-315 | AAUCACAGAAUCUUCGAAAGACA | 119 | NM_001285406.1_ | 293-315 |
| | | | 295-315_C21U_s | | | | 293-315_G1A_as | |
| AD-266992.1 | AGGUGUCUUUCGAAGAUUCUU | 37 | NM_001285406.1_ | 290-310 | AAGAAUCUUCGAAAGACACCUUG | 120 | NM_001285406.1_ | 288-310 |
| | | | 290-310_G21U_s | | | | 288-310_C1A_as | |
| AD-266903.1 | CUUUAAUCCUCUAUCCAGACA | 38 | NM_001285406.1_ | 192-212 | UGUCUGGAUAGAGGAUUAAAGUG | 121 | NM_001285406.1_ | 190-212 |
| | | | 192-212_s | | | | 190-212_as | |
| AD-266891.1 | UGCAGGUCCUCACUUUAAUCU | 39 | NM_001285406.1_ | 180-200 | AGAUUAAAGUGAGGACCUGCACU | 122 | NM_001285406.1_ | 178-200 |
| | | | 180-200_C21U_s | | | | 178-200_G1A_as | |
| AD-266996.1 | GUCUUUCGAAGAUUCUGUGAU | 40 | NM_001285406.1_ | 294-314 | AUCACAGAAUCUUCGAAAGACAC | 123 | NM_001285406.1_ | 292-314 |
| | | | 294-314_s | | | | 292-314_as | |
| AD-266893.1 | CAGGUCCUCACUUUAAUCCUU | 41 | NM_001285406.1_ | 182-202 | AAGGAUUAAAGUGAGGACCUGCA | 124 | NM_001285406.1_ | 180-202 |
| | | | 182-202_C21U_s | | | | 180-202_G1A_as | |
| AD-266898.1 | CCUCACUUUAAUCCUCUAUCU | 42 | NM_001285406.1_ | 187-207 | AGAUAGAGGAUUAAAGUGAGGAC | 125 | NM_001285406.1_ | 185-207 |
| | | | 187-207_C21U_s | | | | 185-207_G1A_as | |
| AD-266886.1 | ACCAGUGCAGGUCCUCACUUU | 43 | NM_001285406.1_ | 175-195 | AAAGUGAGGACCUGCACUGGUAC | 126 | NM_001285406.1_ | 173-195 |
| | | | 175-195_s | | | | 173-195_as | |
| AD-267072.1 | AGCAGAUGACUUGGGCAAAGU | 44 | NM_001285406.1_ | 369-389 | ACUUUGCCCAAGUCAUCUGCUUU | 127 | NM_001285406.1_ | 367-389 |
| | | | 369-389_G21U_s | | | | 367-389_C1A_as | |
| AD-267067.1 | GAAAAAGCAGAUGACUUGGGU | 45 | NM_001285406.1_ | 364-384 | ACCCAAGUCAUCUGCUUUUUCAU | 128 | NM_001285406.1_ | 362-384 |
| | | | 364-384_C21U_s | | | | 362-384_G1A_as | |
| AD-266791.1 | UUCGAGCAGAAGGAAAGUAAU | 46 | NM_001285406.1_ | 61-81 | AUUACUUUCCUUCUGCUCGAAAU | 129 | NM_001285406.1_ | 59-81 |
| | | | 61-81_s | | | | 59-81_as | |
| AD-266789.1 | AUUUCGAGCAGAAGGAAAGUA | 47 | NM_001285406.1_ | 59-79 | UACUUUCCUUCUGCUCGAAAUUG | 130 | NM_001285406.1_ | 57-79 |
| | | | 59-79_s | | | | 57-79_as | |
| AD-266861.1 | CAGUUUGGAGAUAAUACACAA | 48 | NM_001285406.1_ | 148-168 | UUGUGUAUUAUCUCCAAACUGAU | 131 | NM_001285406.1_ | 146-168 |
| | | | 148-168_s | | | | 146-168_as | |
| AD-266856.1 | UUCAUCAGUUUGGAGAUAAUA | 49 | NM_001285406.1_ | 143-163 | UAUUAUCUCCAAACUGAUGAACA | 132 | NM_001285406.1_ | 141-163 |
| | | | 143-163_s | | | | 141-163_as | |
| AD-266899.1 | CUCACUUUAAUCCUCUAUCCA | 50 | NM_001285406.1_ | 188-208 | UGGAUAGAGGAUUAAAGUGAGGA | 133 | NM_001285406.1_ | 186-208 |
| | | | 188-208_s | | | | 186-208_as | |
| AD-267000.1 | UUCGAAGAUUCUGUGAUCUCU | 51 | NM_001285406.1_ | 298-318 | AGAGAUCACAGAAUCUUCGAAAG | 134 | NM_001285406.1_ | 296-318 |
| | | | 298-318_G21U_s | | | | 296-318_C1A_as | |
| AD-267071.1 | AAGCAGAUGACUUGGGCAAAU | 52 | NM_001285406.1_ | 368-388 | AUUUGCCCAAGUCAUCUGCUUUU | 135 | NM_001285406.1_ | 366-388 |
| | | | 368-388_G21U_s | | | | 366-388_C1A_as | |
| AD-266895.1 | GGUCCUCACUUUAAUCCUCUA | 53 | NM_001285406.1_ | 184-204 | UAGAGGAUUAAAGUGAGGACCUG | 136 | NM_001285406.1_ | 182-204 |
| | | | 184-204_s | | | | 182-204_as | |
| AD-266888.1 | CAGUGCAGGUCCUCACUUUAA | 54 | NM_001285406.1_ | 177-197 | UUAAAGUGAGGACCUGCACUGGU | 137 | NM_001285406.1_ | 175-197 |
| | | | 177-197_s | | | | 175-197_as | |
| AD-266817.1 | CAUUACAGGAUUGACUGAAGU | 55 | NM_001285406.1_ | 105-125 | ACUUCAGUCAAUCCUGUAAUGCU | 138 | NM_001285406.1_ | 103-125 |
| | | | 105-125_G21U_s | | | | 103-125_C1A_as | |
| AD-267083.1 | AAAGUAAAAAGACAGGAAACU | 56 | NM_001285406.1_ | 401-421 | AGUUUCCUGUCUUUUUACUUUCU | 139 | NM_001285406.1_ | 399-421 |
| | | | 401-421_G21U_s | | | | 399-421_C1A_as | |
| AD-266862.1 | AGUUUGGAGAUAAUACACAAU | 57 | NM_001285406.1_ | 149-169 | AUUGUGUAUUAUCUCCAAACUGA | 140 | NM_001285406.1_ | 147-169 |
| | | | 149-169_G21U_s | | | | 147-169_C1A_as | |
| AD-267002.1 | CGAAGAUUCUGUGAUCUCGCU | 58 | NM_001285406.1_ | 300-320 | AGCGAGAUCACAGAAUCUUCGAA | 141 | NM_001285406.1_ | 298-320 |
| | | | 300-320_s | | | | 298-320_as | |
| AD-266816.1 | GCAUUACAGGAUUGACUGAAU | 59 | NM_001285406.1_ | 104-124 | AUUCAGUCAAUCCUGUAAUGCUU | 142 | NM_001285406.1_ | 102-124 |
| | | | 104-124_G21U_s | | | | 102-124_C1A_as | |
| AD-266857.1 | UCAUCAGUUUGGAGAUAAUAU | 60 | NM_001285406.1_ | 144-164 | AUAUUAUCUCCAAACUGAUGAAC | 143 | NM_001285406.1_ | 142-164 |
| | | | 144-164_C21U_s | | | | 142-164_G1A_as | |
| AD-266902.1 | ACUUUAAUCCUCUAUCCAGAU | 61 | NM_001285406.1_ | 191-211 | AUCUGGAUAGAGGAUUAAAGUGA | 144 | NM_001285406.1_ | 189-211 |
| | | | 191-211_C21U_s | | | | 189-211_G1A_as | |
| AD-267086.1 | GUAAAAAGACAGGAAACGCUU | 62 | NM_001285406.1_ | 404-424 | AAGCGUUUCCUGUCUUUUUACUU | 145 | NM_001285406.1_ | 402-424 |
| | | | 404-424_G21U_s | | | | 402-424_C1A_as | |
| AD-266785.1 | AUCAAUUUCGAGCAGAAGGAA | 63 | NM_001285406.1_ | 55-75 | UUCCUUCUGCUCGAAAUUGAUGG | 146 | NM_001285406.1_ | 53-75 |
| | | | 55-75_s | | | | 53-75_as | |
| AD-266897.1 | UCCUCACUUUAAUCCUCUAUU | 64 | NM_001285406.1_ | 186-206 | AAUAGAGGAUUAAAGUGAGGACC | 147 | NM_001285406.1_ | 184-206 |
| | | | 186-206_C21U_s | | | | 184-206_G1A_as | |
| AD-266896.1 | GUCCUCACUUUAAUCCUCUAU | 65 | NM_001285406.1_ | 185-205 | AUAGAGGAUUAAAGUGAGGACCU | 148 | NM_001285406.1_ | 183-205 |
| | | | 185-205_s | | | | 183-205_as | |
| AD-266858.1 | CAUCAGUUUGGAGAUAAUACA | 66 | NM_001285406.1_ | 145-165 | UGUAUUAUCUCCAAACUGAUGAA | 149 | NM_001285406.1_ | 143-165 |
| | | | 145-165_s | | | | _143-165_as | |
| AD-267084.1 | AAGUAAAAAGACAGGAAACGU | 67 | NM_001285406.1_ | 402-422 | ACGUUUCCUGUCUUUUUACUUUC | 150 | NM_001285406.1_ | 400-422 |
| | | | 402-422_C21U_s | | | | 400-422_G1A_as | |
| AD-266815.1 | AGCAUUACAGGAUUGACUGAA | 68 | NM_001285406.1_ | 103-123 | UUCAGUCAAUCCUGUAAUGCUUC | 151 | NM_001285406.1_ | 101-123 |
| | | | 103-123_s | | | | 101-123_as | |
| AD-267007.1 | AUUCUGUGAUCUCGCUCUCAU | 69 | NM_001285406.1_ | 305-325 | AUGAGAGCGAGAUCACAGAAUCU | 152 | NM_001285406.1_ | 303-325 |
| | | | 305-325_G21U_s | | | | 303-325_C1A_as | |
| AD-266855.1 | GUUCAUCAGUUUGGAGAUAAU | 70 | NM_001285406.1_ | 142-162 | AUUAUCUCCAAACUGAUGAACAU | 153 | NM_001285406.1_ | 140-162 |
| | | | 142-162_s | | | | 140-162_as | |
| AD-266901.1 | CACUUUAAUCCUCUAUCCAGA | 71 | NM_001285406.1_ | 190-210 | UCUGGAUAGAGGAUUAAAGUGAG | 154 | NM_001285406.1_ | 188-210 |
| | | | 190-210_s | | | | 188-210_as | |
| AD-266994.1 | GUGUCUUUCGAAGAUUCUGUU | 72 | NM_001285406.1_ | 292-312 | AACAGAAUCUUCGAAAGACACCU | 155 | NM_001285406.1_ | 290-312 |
| | | | 292-312_G21U_s | | | | 290-312_C1A_as | |
| AD-266793.1 | CGAGCAGAAGGAAAGUAAUGU | 73 | NM_001285406.1_ | 63-83 | ACAUUACUUUCCUUCUGCUCGAA | 156 | NM_001285406.1_ | 61-83 |
| | | | 63-83_G21U_s | | | | 61-83_C1A_as | |
| AD-266850.1 | UCCAUGUUCAUCAGUUUGGAU | 74 | NM_001285406.1_ | 137-157 | AUCCAAACUGAUGAACAUGGAAU | 157 | NM_001285406.1_ | 135-157 |
| | | | 137-157_G21U_s | | | | 135-157_C1A_as | |
| AD-266887.1 | CCAGUGCAGGUCCUCACUUUA | 75 | NM_001285406.1_ | 176-196 | UAAAGUGAGGACCUGCACUGGUA | 158 | NM_001285406.1_ | 174-196 |
| | | | 176-196_s | | | | _174-196_as | |
| AD-266894.1 | AGGUCCUCACUUUAAUCCUCU | 76 | NM_001285406.1_ | 183-203 | AGAGGAUUAAAGUGAGGACCUGC | 159 | NM_001285406.1_ | 181-203 |
| | | | 183-203_s | | | | 181-203_as | |
| AD-266988.1 | GCCAAGGUGUCUUUCGAAGAU | 77 | NM_001285406.1_ | 286-306 | AUCUUCGAAAGACACCUUGGCCA | 160 | NM_001285406.1_ | 284-306 |
| | | | 286-306_s | | | | 284-306_as | |
| AD-267085.1 | AGUAAAAAGACAGGAAACGCU | 78 | NM_001285406.1_ | 403-423 | AGCGUUUCCUGUCUUUUUACUUU | 161 | NM_001285406.1_ | 401-423 |
| | | | 403-423_s | | | | 401-423_as | |
| AD-266873.1 | AUACACAAGGCUGUACCAGUU | 79 | NM_001285406.1_ | 161-181 | AACUGGUACAGCCUUGUGUAUUA | 162 | NM_001285406.1_ | 159-181 |
| | | | 161-181_G21U_s | | | | 159-181_C1A_as | |
| AD-266907.1 | AAUCCUCUAUCCAGACAACAU | 80 | NM_001285406.1_ | 196-216 | AUGUUGUCUGGAUAGAGGAUUAA | 163 | NM_001285406.1_ | 194-216 |
| | | | 196-216_C21U_s | | | | 194-216_G1A_as | |
| AD-266792.1 | UCGAGCAGAAGGAAAGUAAUU | 81 | NM_001285406.1_ | 62-82 | AAUUACUUUCCUUCUGCUCGAAA | 164 | NM_001285406.1_ | 60-82 |
| | | | 62-82_G21U_s | | | | 60-82_C1A_as | |
| AD-266900.1 | UCACUUUAAUCCUCUAUCCAU | 82 | NM_001285406.1_ | 189-209 | AUGGAUAGAGGAUUAAAGUGAGG | 165 | NM_001285406.1_ | 187-209 |
| | | | 189-209_G21U_s | | | | 187-209_C1A_as | |
| AD-266797.1 | CAGAAGGAAAGUAAUGGACCA | 83 | NM_001285406.1_ | 67-87 | UGGUCCAUUACUUUCCUUCUGCU | 166 | NM_001285406.1_ | 65-87 |
| | | | 67-87_s | | | | 65-87_as | |
| AD-266787.1 | CAAUUUCGAGCAGAAGGAAAU | 84 | NM_001285406.1_ | 57-77 | AUUUCCUUCUGCUCGAAAUUGAU | 167 | NM_001285406.1_ | 55-77 |
| | | | 57-77_G21U_s | | | | 55-77_C1A_as | |
| AD-266800.1 | AAGGAAAGUAAUGGACCAGUU | 85 | NM_001285406.1_ | 70-90 | AACUGGUCCAUUACUUUCCUUCU | 168 | NM_001285406.1_ | 68-90 |
| | | | 70-90_G21U_s | | | | 68-90_C1A_as | |
| AD-266889.1 | AGUGCAGGUCCUCACUUUAAU | 86 | NM_001285406.1_ | 178-198 | AUUAAAGUGAGGACCUGCACUGG | 169 | NM_001285406.1_ | 176-198 |
| | | | 178-198_s | | | | 176-198_as | |
| AD-266847.1 | GAUUCCAUGUUCAUCAGUUUG | 87 | NM_001285406.1_ | 134-154 | CAAACUGAUGAACAUGGAAUCCA | 170 | NM_001285406.1_ | 132-154 |
| | | | 134-154_s | | | | 132-154_as | |
| AD-266998.1 | CUUUCGAAGAUUCUGUGAUCU | 88 | NM_001285406.1_ | 296-316 | AGAUCACAGAAUCUUCGAAAGAC | 171 | NM_001285406.1_ | 294-316 |
| | | | 296-316_s | | | | 294-316_as | |
| AD-266790.1 | UUUCGAGCAGAAGGAAAGUAA | 89 | NM_001285406.1_ | 60-80 | UUACUUUCCUUCUGCUCGAAAUU | 172 | NM_001285406.1_ | 58-80 |
| | | | 60-80_s | | | | 58-80_as | |
| AD-266906.1 | UAAUCCUCUAUCCAGACAACA | 90 | NM_001285406.1_ | 195-215 | UGUUGUCUGGAUAGAGGAUUAAA | 173 | NM_001285406.1_ | 193-215 |
| | | | 195-215_s | | | | 193-215_as | |
| AD-266854.1 | UGUUCAUCAGUUUGGAGAUAA | 91 | NM_001285406.1_ | 141-161 | UUAUCUCCAAACUGAUGAACAUG | 174 | NM_001285406.1_ | 139-161 |
| | | | 141-161_s | | | | 139-161_as | |
| AD-266890.1 | GUGCAGGUCCUCACUUUAAUU | 92 | NM_001285406.1_ | 179-199 | AAUUAAAGUGAGGACCUGCACUG | 175 | NM_001285406.1_ | 177-199 |
| | | | 179-199_C21U_s | | | | 177-199_G1A_as | |
| AD-266808.1 | UAAUGGACCAGUGAAGGUGUU | 93 | NM_001285406.1_ | 78-98 | AACACCUUCACUGGUCCAUUACU | 176 | NM_001285406.1_ | 76-98 |
| | | | 78-98_G21U_s | | | | 76-98_C1A_as | |
| AD-266905.1 | UUAAUCCUCUAUCCAGACAAU | 94 | NM_001285406.1_ | 194-214 | AUUGUCUGGAUAGAGGAUUAAAG | 177 | NM_001285406.1_ | 192-214 |
| | | | 194-214_C21U_s | | | | 192-214_G1A_as | |
| AD-267024.1 | UCAGGAGACCAUUCCAUCAUU | 95 | NM_001285406.1_ | 322-342 | AAUGAUGGAAUGGUCUCCUGAGA | 178 | NM_001285406.1_ | 320-342 |
| | | | 322-342_s | | | | 320-342_as | |
| AD-266781.1 | CACCAUCAAUUUCGAGCAGAA | 96 | NM_001285406.1_ | 51-71 | UUCUGCUCGAAAUUGAUGGUGCC | 179 | NM_001285406.1_ | 49-71 |
| | | | 51-71_s | | | | 49-71_as | |
| AD-266892.1 | GCAGGUCCUCACUUUAAUCCU | 97 | NM_001285406.1_ | 181-201 | AGGAUUAAAGUGAGGACCUGCAC | 180 | NM_001285406.1_ | 179-201 |
| | | | 181-201_s | | | | 179-201_as | |
| AD-266999.1 | UUUCGAAGAUUCUGUGAUCUU | 98 | NM_001285406.1_ | 297-317 | AAGAUCACAGAAUCUUCGAAAGA | 181 | NM_001285406.1_ | 295-317 |
| | | | 297-317_C21U_s | | | | 295-317_G1A_as | |
| AD-266841.1 | UGCAUGGAUUCCAUGUUCAUU | 99 | NM_001285406.1_ | 128-148 | AAUGAACAUGGAAUCCAUGCAGG | 182 | NM_001285406.1_ | 126-148 |
| | | | 128-148_C21U_s | | | | 126-148_G1A_as | |
| AD-266908.1 | AUCCUCUAUCCAGACAACACU | 100 | NM_001285406.1_ | 197-217 | AGUGUUGUCUGGAUAGAGGAUUA | 183 | NM_001285406.1_ | 195-217 |
| | | | 197-217_G21U_s | | | | 195-217_C1A_as | |
| AD-267005.1 | AGAUUCUGUGAUCUCGCUCUU | 101 | NM_001285406.1_ | 303-323 | AAGAGCGAGAUCACAGAAUCUUC | 184 | NM_001285406.1_ | 301-323 |
| | | | 303-323_C21U_s | | | | 301-323_G1A_as | |
| AD-266942.1 | GAAGAGAGGCAUGUUGGAGAU | 102 | NM_001285406.1_ | 232-252 | AUCUCCAACAUGCCUCUCUUCAU | 185 | NM_001285406.1_ | 230-252 |
| | | | 232-252_C21U_s | | | | 230-252_G1A_as | |
| AD-135967.3 | UUGGGCAAAGGUGGAAAUGAA | 103 | NM_011434.1_ | 495-515 | UUCAUUUCCACCUUUGCCCAAGU | 186 | NM_011434.1_ | 493-515 |
| | | | 495-515_s | | | | 493-515_as | |
| AD-266786.1 | UCAAUUUCGAGCAGAAGGAAA | 104 | NM_001285406.1_ | 56-76 | UUUCCUUCUGCUCGAAAUUGAUG | 187 | NM_001285406.1_ | 54-76 |
| | | | 56-76_s | | | | 54-76_as | |
| AD-267064.1 | CAUGAAAAAGCAGAUGACUUU | 105 | NM_001285406.1_ | 361-381 | AAAGUCAUCUGCUUUUUCAUGGA | 188 | NM_001285406.1_ | 359-381 |
| | | | 361-381_G21U_s | | | | 359-381_C1A_as | |
| AD-266845.1 | UGGAUUCCAUGUUCAUCAGUU | 106 | NM_001285406.1_ | 132-152 | AACUGAUGAACAUGGAAUCCAUG | 189 | NM_001285406.1_ | 130-152 |
| | | | 132-152_s | | | | 130-152_as | |
| AD-266944.1 | GAGAGGCAUGUUGGAGACCUU | 107 | NM_001285406.1_ | 235-255 | AAGGUCUCCAACAUGCCUCUCUU | 190 | NM_001285406.1_ | 233-255 |
| | | | 235-255_G21U_s | | | | 233-255_C1A_as | |
| AD-267003.1 | GAAGAUUCUGUGAUCUCGCUU | 108 | NM_001285406.1_ | 301-321 | AAGCGAGAUCACAGAAUCUUCGA | 191 | NM_001285406.1_ | 299-321 |
| | | | 301-321_C21U_s | | | | 299-321_G1A_as | |
| AD-266860.1 | UCAGUUUGGAGAUAAUACACA | 109 | NM_001285406.1_ | 147-167 | UGUGUAUUAUCUCCAAACUGAUG | 192 | NM_001285406.1_ | 145-167 |
| | | | 147-167_s | | | | 145-167_as | |
| AD-266990.1 | CAAGGUGUCUUUCGAAGAUUU | 110 | NM_001285406.1_ | 288-308 | AAAUCUUCGAAAGACACCUUGGC | 193 | NM_001285406.1_ | 286-308 |
| | | | 288-308_C21U_s | | | | 286-308_G1A_as | |
| AD-266853.1 | AUGUUCAUCAGUUUGGAGAUA | 111 | NM_001285406.1_ | 140-160 | UAUCUCCAAACUGAUGAACAUGG | 194 | NM_001285406.1_ | 138-160 |
| | | | 140-160_s | | | | 138-160_as | |
| AD-266782.1 | ACCAUCAAUUUCGAGCAGAAU | 112 | NM_001285406.1_ | 52-72 | AUUCUGCUCGAAAUUGAUGGUGC | 195 | NM_001285406.1_ | 50-72 |
| | | | 52-72_G21U_s | | | | 50-72_C1A_as | |
| AD-266962.1 | AUGUGACUGCUGGCAAAGAUU | 113 | NM_001285406.1_ | 260-280 | AAUCUUUGCCAGCAGUCACAUUG | 196 | NM_001285406.1_ | 258-280 |
| | | | 260-280_G21U_s | | | | 258-280_C1A_as | |
| AD-267079.1 | GGUGGAAAUGAAGAAAGUAAA | 114 | NM_001285406.1_ | 388-408 | UUUACUUUCUUCAUUUCCACCUU | 197 | NM_001285406.1_ | 386-408 |
| | | | 388-408_s | | | | 386-408_as | |
| AD-266846.1 | GGAUUCCAUGUUCAUCAGUUU | 115 | NM_001285406.1_ | 133-153 | AAACUGAUGAACAUGGAAUCCAU | 198 | NM_001285406.1_ | 131-153 |
| | | | 133-153_s | | | | 131-153_as | |
| AD-266961.1 | AAUGUGACUGCUGGCAAAGAU | 116 | NM_001285406.1_ | 259-279 | AUCUUUGCCAGCAGUCACAUUGC | 199 | NM_001285406.1_ | 257-279 |
| | | | 259-279_s | | | | 257-279_as | |
| AD-267061.1 | GUCCAUGAAAAAGCAGAUGAU | 117 | NM_001285406.1_ | 358-378 | AUCAUCUGCUUUUUCAUGGACCA | 200 | NM_001285406.1_ | 356-378 |
| | | | 358-378_C21U_s | | | | 356-378_G1A_as | |

TABLE 3
Modified Sense and Antisense Strand Sequences of Superoxide Dismutase 1 dsRNA Agents

| | | SEQ ID | | SEQ ID | | SEQ ID |
|---|---|---|---|---|---|---|
| Duplex Name | Sense Sequence 5′ to 3′ | NO: | Antisense Sequence 5′ to 3′ | NO: | mRNA target sequence | NO: |
| AD-266859.1 | asuscaguUfuGfGfAfgauaauacauL96 | 201 | asUfsguaUfuAfUfcuccAfaAfcugausgsa | 284 | UCAUCAGUUUGGAGAUAAUACAC | 367 |
| AD-266997.1 | uscsuuucGfaAfGfAfuucugugauuL96 | 202 | asAfsucaCfaGfAfaucuUfcGfaaagascsa | 285 | UGUCUUUCGAAGAUUCUGUGAUC | 368 |
| AD-266992.1 | asgsguguCfuUfUfCfgaagauucuuL96 | 203 | asAfsgaaUfcUfUfcgaaAfgAfcaccususg | 286 | CAAGGUGUCUUUCGAAGAUUCUG | 369 |
| AD-266903.1 | csusuuaaUfcCfUfCfuauccagacaL96 | 204 | usGfsucuGfgAfUfagagGfaUfuaaagsusg | 287 | CACUUUAAUCCUCUAUCCAGACA | 370 |
| AD-266891.1 | usgscaggUfcCfUfCfacuuuaaucuL96 | 205 | asGfsauuAfaAfGfugagGfaCfcugcascsu | 288 | AGUGCAGGUCCUCACUUUAAUCC | 371 |
| AD-266996.1 | gsuscuuuCfgAfAfGfauucugugauL96 | 206 | asUfscacAfgAfAfucuuCfgAfaagacsasc | 289 | GUGUCUUUCGAAGAUUCUGUGAU | 372 |
| AD-266893.1 | csasggucCfuCfAfCfuuuaauccuuL96 | 207 | asAfsggaUfuAfAfagugAfgGfaccugscsa | 290 | UGCAGGUCCUCACUUUAAUCCUC | 373 |
| AD-266898.1 | cscsucacUfuUfAfAfuccucuaucuL96 | 208 | asGfsauaGfaGfGfauuaAfaGfugaggsasc | 291 | GUCCUCACUUUAAUCCUCUAUCC | 374 |
| AD-266886.1 | ascscaguGfcAfGfGfuccucacuuuL96 | 209 | asAfsaguGfaGfGfaccuGfcAfcuggusasc | 292 | GUACCAGUGCAGGUCCUCACUUU | 375 |
| AD-267072.1 | asgscagaUfgAfCfUfugggcaaaguL96 | 210 | asCfsuuuGfcCfCfaaguCfaUfcugcususu | 293 | AAAGCAGAUGACUUGGGCAAAGG | 376 |
| AD-267067.1 | gsasaaaaGfcAfGfAfugacuuggguL96 | 211 | asCfsccaAfgUfCfaucuGfcUfuuuucsasu | 294 | AUGAAAAAGCAGAUGACUUGGGC | 377 |
| AD-266791.1 | ususcgagCfaGfAfAfggaaaguaauL96 | 212 | asUfsuacUfuUfCfcuucUfgCfucgaasasu | 295 | AUUUCGAGCAGAAGGAAAGUAAU | 378 |
| AD-266789.1 | asusuucgAfgCfAfGfaaggaaaguaL96 | 213 | usAfscuuUfcCfUfucugCfuCfgaaaususg | 296 | CAAUUUCGAGCAGAAGGAAAGUA | 379 |
| AD-266861.1 | csasguuuGfgAfGfAfuaauacacaaL96 | 214 | usUfsgugUfaUfUfaucuCfcAfaacugsasu | 297 | AUCAGUUUGGAGAUAAUACACAA | 380 |
| AD-266856.1 | ususcaucAfgUfUfUfggagauaauaL96 | 215 | usAfsuuaUfcUfCfcaaaCfuGfaugaascsa | 298 | UGUUCAUCAGUUUGGAGAUAAUA | 381 |
| AD-266899.1 | csuscacuUfuAfAfUfccucuauccaL96 | 216 | usGfsgauAfgAfGfgauuAfaAfgugagsgsa | 299 | UCCUCACUUUAAUCCUCUAUCCA | 382 |
| AD-267000.1 | ususcgaaGfaUfUfCfugugaucucuL96 | 217 | asGfsagaUfcAfCfagaaUfcUfucgaasasg | 300 | CUUUCGAAGAUUCUGUGAUCUCG | 383 |
| AD-267071.1 | asasgcagAfuGfAfCfuugggcaaauL96 | 218 | asUfsuugCfcCfAfagucAfuCfugcuususu | 301 | AAAAGCAGAUGACUUGGGCAAAG | 384 |
| AD-266895.1 | gsgsuccuCfaCfUfUfuaauccucuaL96 | 219 | usAfsgagGfaUfUfaaagUfgAfggaccsusg | 302 | CAGGUCCUCACUUUAAUCCUCUA | 385 |
| AD-266888.1 | csasgugcAfgGfUfCfcucacuuuaaL96 | 220 | usUfsaaaGfuGfAfggacCfuGfcacugsgsu | 303 | ACCAGUGCAGGUCCUCACUUUAA | 386 |
| AD-266817.1 | csasuuacAfgGfAfUfugacugaaguL96 | 221 | asCfsuucAfgUfCfaaucCfuGfuaaugscsu | 304 | AGCAUUACAGGAUUGACUGAAGG | 387 |
| AD-267083.1 | asasaguaAfaAfAfGfacaggaaacuL96 | 222 | asGfsuuuCfcUfGfucuuUfuUfacuuuscsu | 305 | AGAAAGUAAAAAGACAGGAAACG | 388 |
| AD-266862.1 | asgsuuugGfaGfAfUfaauacacaauL96 | 223 | asUfsuguGfuAfUfuaucUfcCfaaacusgsa | 306 | UCAGUUUGGAGAUAAUACACAAG | 389 |
| AD-267002.1 | csgsaagaUfuCfUfGfugaucucgcuL96 | 224 | asGfscgaGfaUfCfacagAfaUfcuucgsasa | 307 | UUCGAAGAUUCUGUGAUCUCGCU | 390 |
| AD-266816.1 | gscsauuaCfaGfGfAfuugacugaauL96 | 225 | asUfsucaGfuCfAfauccUfgUfaaugcsusu | 308 | AAGCAUUACAGGAUUGACUGAAG | 391 |
| AD-266857.1 | uscsaucaGfuUfUfGfgagauaauauL96 | 226 | asUfsauuAfuCfUfccaaAfcUfgaugasasc | 309 | GUUCAUCAGUUUGGAGAUAAUAC | 392 |
| AD-266902.1 | ascsuuuaAfuCfCfUfcuauccagauL96 | 227 | asUfscugGfaUfAfgaggAfuUfaaagusgsa | 310 | UCACUUUAAUCCUCUAUCCAGAC | 393 |
| AD-267086.1 | gsusaaaaAfgAfCfAfggaaacgcuuL96 | 228 | asAfsgcgUfuUfCfcuguCfuUfuuuacsusu | 311 | AAGUAAAAAGACAGGAAACGCUG | 394 |
| AD-266785.1 | asuscaauUfuCfGfAfgcagaaggaaL96 | 229 | usUfsccuUfcUfGfcucgAfaAfuugausgsg | 312 | CCAUCAAUUUCGAGCAGAAGGAA | 395 |
| AD-266897.1 | uscscucaCfuUfUfAfauccucuauuL96 | 230 | asAfsuagAfgGfAfuuaaAfgUfgaggascsc | 313 | GGUCCUCACUUUAAUCCUCUAUC | 396 |
| AD-266896.1 | gsusccucAfcUfUfUfaauccucuauL96 | 231 | asUfsagaGfgAfUfuaaaGfuGfaggacscsu | 314 | AGGUCCUCACUUUAAUCCUCUAU | 397 |
| AD-266858.1 | csasucagUfuUfGfGfagauaauacaL96 | 232 | usGfsuauUfaUfCfuccaAfaCfugaugsasa | 315 | UUCAUCAGUUUGGAGAUAAUACA | 398 |
| AD-267084.1 | asasguaaAfaAfGfAfcaggaaacguL96 | 233 | asCfsguuUfcCfUfgucuUfuUfuacuususc | 316 | GAAAGUAAAAAGACAGGAAACGC | 399 |
| AD-266815.1 | asgscauuAfcAfGfGfauugacugaaL96 | 234 | usUfscagUfcAfAfuccuGfuAfaugcususc | 317 | GAAGCAUUACAGGAUUGACUGAA | 400 |
| AD-267007.1 | asusucugUfgAfUfCfucgcucucauL96 | 235 | asUfsgagAfgCfGfagauCfaCfagaauscsu | 318 | AGAUUCUGUGAUCUCGCUCUCAG | 401 |
| AD-266855.1 | gsusucauCfaGfUfUfuggagauaauL96 | 236 | asUfsuauCfuCfCfaaacUfgAfugaacsasu | 319 | AUGUUCAUCAGUUUGGAGAUAAU | 402 |
| AD-266901.1 | csascuuuAfaUfCfCfucuauccagaL96 | 237 | usCfsuggAfuAfGfaggaUfuAfaagugsasg | 320 | CUCACUUUAAUCCUCUAUCCAGA | 403 |
| AD-266994.1 | gsusgucuUfuCfGfAfagauucuguuL96 | 238 | asAfscagAfaUfCfuucgAfaAfgacacscsu | 321 | AGGUGUCUUUCGAAGAUUCUGUG | 404 |
| AD-266793.1 | csgsagcaGfaAfGfGfaaaguaauguL96 | 239 | asCfsauuAfcUfUfuccuUfcUfgcucgsasa | 322 | UUCGAGCAGAAGGAAAGUAAUGG | 405 |
| AD-266850.1 | uscscaugUfuCfAfUfcaguuuggauL96 | 240 | asUfsccaAfaCfUfgaugAfaCfauggasasu | 323 | AUUCCAUGUUCAUCAGUUUGGAG | 406 |
| AD-266887.1 | cscsagugCfaGfGfUfccucacuuuaL96 | 241 | usAfsaagUfgAfGfgaccUfgCfacuggsusa | 324 | UACCAGUGCAGGUCCUCACUUUA | 407 |
| AD-266894.1 | asgsguccUfcAfCfUfuuaauccucuL96 | 242 | asGfsaggAfuUfAfaaguGfaGfgaccusgsc | 325 | GCAGGUCCUCACUUUAAUCCUCU | 408 |
| AD-266988.1 | gscscaagGfuGfUfCfuuucgaagauL96 | 243 | asUfscuuCfgAfAfagacAfcCfuuggcscsa | 326 | UGGCCAAGGUGUCUUUCGAAGAU | 409 |
| AD-267085.1 | asgsuaaaAfaGfAfCfaggaaacgcuL96 | 244 | asGfscguUfuCfCfugucUfuUfuuacususu | 327 | AAAGUAAAAAGACAGGAAACGCU | 410 |
| AD-266873.1 | asusacacAfaGfGfCfuguaccaguuL96 | 245 | asAfscugGfuAfCfagccUfuGfuguaususa | 328 | UAAUACACAAGGCUGUACCAGUG | 411 |
| AD-266907.1 | asasuccuCfuAfUfCfcagacaacauL96 | 246 | asUfsguuGfuCfUfggauAfgAfggauusasa | 329 | UUAAUCCUCUAUCCAGACAACAC | 412 |
| AD-266792.1 | uscsgagcAfgAfAfGfgaaaguaauuL96 | 247 | asAfsuuaCfuUfUfccuuCfuGfcucgasasa | 330 | UUUCGAGCAGAAGGAAAGUAAUG | 413 |
| AD-266900.1 | uscsacuuUfaAfUfCfcucuauccauL96 | 248 | asUfsggaUfaGfAfggauUfaAfagugasgsg | 331 | CCUCACUUUAAUCCUCUAUCCAG | 414 |
| AD-266797.1 | csasgaagGfaAfAfGfuaauggaccaL96 | 249 | usGfsgucCfaUfUfacuuUfcCfuucugscsu | 332 | AGCAGAAGGAAAGUAAUGGACCA | 415 |
| AD-266787.1 | csasauuuCfgAfGfCfagaaggaaauL96 | 250 | asUfsuucCfuUfCfugcuCfgAfaauugsasu | 333 | AUCAAUUUCGAGCAGAAGGAAAG | 416 |
| AD-266800.1 | asasggaaAfgUfAfAfuggaccaguuL96 | 251 | asAfscugGfuCfCfauuaCfuUfuccuuscsu | 334 | AGAAGGAAAGUAAUGGACCAGUG | 417 |
| AD-266889.1 | asgsugcaGfgUfCfCfucacuuuaauL96 | 252 | asUfsuaaAfgUfGfaggaCfcUfgcacusgsg | 335 | CCAGUGCAGGUCCUCACUUUAAU | 418 |
| AD-266847.1 | gsasuuccAfuGfUfUfcaucaguuugL96 | 253 | csAfsaacUfgAfUfgaacAfuGfgaaucscsa | 336 | UGGAUUCCAUGUUCAUCAGUUUG | 419 |
| AD-266998.1 | csusuucgAfaGfAfUfucugugaucuL96 | 254 | asGfsaucAfcAfGfaaucUfuCfgaaagsasc | 337 | GUCUUUCGAAGAUUCUGUGAUCU | 420 |
| AD-266790.1 | ususucgaGfcAfGfAfaggaaaguaaL96 | 255 | usUfsacuUfuCfCfuucuGfcUfcgaaasusu | 338 | AAUUUCGAGCAGAAGGAAAGUAA | 421 |
| AD-266906.1 | usasauccUfcUfAfUfccagacaacaL96 | 256 | usGfsuugUfcUfGfgauaGfaGfgauuasasa | 339 | UUUAAUCCUCUAUCCAGACAACA | 422 |
| AD-266854.1 | usgsuucaUfcAfGfUfuuggagauaaL96 | 257 | usUfsaucUfcCfAfaacuGfaUfgaacasusg | 340 | CAUGUUCAUCAGUUUGGAGAUAA | 423 |
| AD-266890.1 | gsusgcagGfuCfCfUfcacuuuaauuL96 | 258 | asAfsuuaAfaGfUfgaggAfcCfugcacsusg | 341 | CAGUGCAGGUCCUCACUUUAAUC | 424 |
| AD-266808.1 | usasauggAfcCfAfGfugaagguguuL96 | 259 | asAfscacCfuUfCfacugGfuCfcauuascsu | 342 | AGUAAUGGACCAGUGAAGGUGUG | 425 |
| AD-266905.1 | ususaaucCfuCfUfAfuccagacaauL96 | 260 | asUfsuguCfuGfGfauagAfgGfauuaasasg | 343 | CUUUAAUCCUCUAUCCAGACAAC | 426 |
| AD-267024.1 | uscsaggaGfaCfCfAfuuccaucauuL96 | 261 | asAfsugaUfgGfAfauggUfcUfccugasgsa | 344 | UCUCAGGAGACCAUUCCAUCAUU | 427 |
| AD-266781.1 | csasccauCfaAfUfUfucgagcagaaL96 | 262 | usUfscugCfuCfGfaaauUfgAfuggugscsc | 345 | GGCACCAUCAAUUUCGAGCAGAA | 428 |
| AD-266892.1 | gscsagguCfcUfCfAfcuuuaauccuL96 | 263 | asGfsgauUfaAfAfgugaGfgAfccugcsasc | 346 | GUGCAGGUCCUCACUUUAAUCCU | 429 |
| AD-266999.1 | ususucgaAfgAfUfUfcugugaucuuL96 | 264 | asAfsgauCfaCfAfgaauCfuUfcgaaasgsa | 347 | UCUUUCGAAGAUUCUGUGAUCUC | 430 |
| AD-266841.1 | usgscaugGfaUfUfCfcauguucauuL96 | 265 | asAfsugaAfcAfUfggaaUfcCfaugcasgsg | 348 | CCUGCAUGGAUUCCAUGUUCAUC | 431 |
| AD-266908.1 | asusccucUfaUfCfCfagacaacacuL96 | 266 | asGfsuguUfgUfCfuggaUfaGfaggaususa | 349 | UAAUCCUCUAUCCAGACAACACG | 432 |
| AD-267005.1 | asgsauucUfgUfGfAfucucgcucuuL96 | 267 | asAfsgagCfgAfGfaucaCfaGfaaucususc | 350 | GAAGAUUCUGUGAUCUCGCUCUC | 433 |
| AD-266942.1 | gsasagagAfgGfCfAfuguuggagauL96 | 268 | asUfscucCfaAfCfaugcCfuCfucuucsasu | 351 | AUGAAGAGAGGCAUGUUGGAGAC | 434 |
| AD-135967.3 | ususgggcAfaAfGfGfuggaaaugaaL96 | 269 | usUfscauUfuCfCfaccuUfuGfcccaasgsu | 352 | ACUUGGGCAAAGGUGGAAAUGAA | 435 |
| AD-266786.1 | uscsaauuUfcGfAfGfcagaaggaaaL96 | 270 | usUfsuccUfuCfUfgcucGfaAfauugasusg | 353 | CAUCAAUUUCGAGCAGAAGGAAA | 436 |
| AD-267064.1 | csasugaaAfaAfGfCfagaugacuuuL96 | 271 | asAfsaguCfaUfCfugcuUfuUfucaugsgsa | 354 | UCCAUGAAAAAGCAGAUGACUUG | 437 |
| AD-266845.1 | usgsgauuCfcAfUfGfuucaucaguuL96 | 272 | asAfscugAfuGfAfacauGfgAfauccasusg | 355 | CAUGGAUUCCAUGUUCAUCAGUU | 438 |
| AD-266944.1 | gsasgaggCfaUfGfUfuggagaccuuL96 | 273 | asAfsgguCfuCfCfaacaUfgCfcucucsusu | 356 | AAGAGAGGCAUGUUGGAGACCUG | 439 |
| AD-267003.1 | gsasagauUfcUfGfUfgaucucgcuuL96 | 274 | asAfsgcgAfgAfUfcacaGfaAfucuucsgsa | 357 | UCGAAGAUUCUGUGAUCUCGCUC | 440 |
| AD-266860.1 | uscsaguuUfgGfAfGfauaauacacaL96 | 275 | usGfsuguAfuUfAfucucCfaAfacugasusg | 358 | CAUCAGUUUGGAGAUAAUACACA | 441 |
| AD-266990.1 | csasagguGfuCfUfUfucgaagauuuL96 | 276 | asAfsaucUfuCfGfaaagAfcAfccuugsgsc | 359 | GCCAAGGUGUCUUUCGAAGAUUC | 442 |
| AD-266853.1 | asusguucAfuCfAfGfuuuggagauaL96 | 277 | usAfsucuCfcAfAfacugAfuGfaacausgsg | 360 | CCAUGUUCAUCAGUUUGGAGAUA | 443 |
| AD-266782.1 | ascscaucAfaUfUfUfcgagcagaauL96 | 278 | asUfsucuGfcUfCfgaaaUfuGfauggusgsc | 361 | GCACCAUCAAUUUCGAGCAGAAG | 444 |
| AD-266962.1 | asusgugaCfuGfCfUfggcaaagauuL96 | 279 | asAfsucuUfuGfCfcagcAfgUfcacaususg | 362 | CAAUGUGACUGCUGGCAAAGAUG | 445 |
| AD-267079.1 | gsgsuggaAfaUfGfAfagaaaguaaaL96 | 280 | usUfsuacUfuUfCfuucaUfuUfccaccsusu | 363 | AAGGUGGAAAUGAAGAAAGUAAA | 446 |
| AD-266846.1 | gsgsauucCfaUfGfUfucaucaguuuL96 | 281 | asAfsacuGfaUfGfaacaUfgGfaauccsasu | 364 | AUGGAUUCCAUGUUCAUCAGUUU | 447 |
| AD-266961.1 | asasugugAfcUfGfCfuggcaaagauL96 | 282 | asUfscuuUfgCfCfagcaGfuCfacauusgsc | 365 | GCAAUGUGACUGCUGGCAAAGAU | 448 |
| AD-267061.1 | gsusccauGfaAfAfAfagcagaugauL96 | 283 | asUfscauCfuGfCfuuuuUfcAfuggacscsa | 366 | UGGUCCAUGAAAAAGCAGAUGAC | 449 |

TABLE 4
Unmodified Sense and Antisense Strand Sequences of Superoxide Dismutase 1 dsRNA Agents[

| | | | | Range in | | | | Range in |
|---|---|---|---|---|---|---|---|---|
| | | | | GenBank | | | | GenBank |
| | | | | Acession | | | | Acession |
| | | SEQ | | No. in | | SEQ | | No. in |
| Duplex | | ID | | Source | | ID | | Source |
| Name | Sense Sequence 5′ to 3′ | NO: | Source Name | Name | Antisense Sequence 5′ to 3′ | NO: | Source Name | Name |
| AD- | AUGACUUGGGCAAAGGUGGA | 450 | NM_011434.1_490- | 490-510 | UUCCACCUUUGCCCAAGUCAU | 529 | NM_011434.1_488- | 488-510 |
| 135962.1 | A | | 510_s | | CU | | 510_as | |
| AD- | UGACUUGGGCAAAGGUGGAA | 451 | NM_011434.1_491- | 491-511 | UUUCCACCUUUGCCCAAGUCA | 530 | NM_011434.1_489- | 489-511 |
| 135963.1 | A | | 511_s | | UC | | 511_as | |
| AD- | GACUUGGGCAAAGGUGGAAA | 452 | NM_011434.1_492- | 492-512 | AUUUCCACCUUUGCCCAAGUC | 531 | NM_011434.1_490- | 490-512 |
| 135964.1 | U | | 512_s | | AU | | 512_as | |
| AD- | UUGGGCAAAGGUGGAAAUGA | 103 | NM_011434.1_495- | 495-515 | UUCAUUUCCACCUUUGCCCAA | 186 | NM_011434.1_493- | 493-515 |
| 135967.5 | A | | 515_s | | GU | | 515_as | |
| AD- | AAGGUGGAAAUGAAGAAAGU | 453 | NM_011434.1_502- | 502-522 | UACUUUCUUCAUUUCCACCUU | 532 | NM_011434.1_500- | 500-522 |
| 135974.3 | A | | 522_s | | UG | | 522_as | |
| AD- | AAUUUCGAGCAGAAGGAAAG | 454 | NM_001285406.1_ | 58-78 | ACUUUCCUUCUGCUCGAAAUU | 533 | NM_001285406.1_ | 56-78 |
| 266788.1 | U | | 58-78_s | | GA | | 56-78_as | |
| AD- | AUUUCGAGCAGAAGGAAAGU | 47 | NM_001285406.1_ | 59-79 | UACUUUCCUUCUGCUCGAAAU | 130 | NM_001285406.1_ | 57-79 |
| 266789.2 | A | | 59-79_s | | UG | | 57-79_as | |
| AD- | UUUCGAGCAGAAGGAAAGUA | 89 | NM_001285406.1_ | 60-80 | UUACUUUCCUUCUGCUCGAAA | 172 | NM_001285406.1_ | 58-80 |
| 266790.2 | A | | 60-80_s | | UU | | 58-80_as | |
| AD- | UUCGAGCAGAAGGAAAGUAA | 46 | NM_001285406.1_ | 61-81 | AUUACUUUCCUUCUGCUCGAA | 129 | NM_001285406.1_ | 59-81 |
| 266791.3 | U | | 61-81_s | | AU | | 59-81_as | |
| AD- | GAGCAGAAGGAAAGUAAUGG | 455 | NM_001285406.1_ | 64-84 | UCCAUUACUUUCCUUCUGCUC | 534 | NM_001285406.1_ | 62-84 |
| 266794.1 | A | | 64-84_s | | GA | | 62-84_as | |
| AD- | AGAAGGAAAGUAAUGGACCA | 456 | NM_001285406.1_ | 68-88 | AUGGUCCAUUACUUUCCUUCU | 535 | NM_001285406.1_ | 66-88 |
| 266798.1 | U | | 68-88_G21U_s | | GC | | 66-88_C1A_as | |
| AD- | GAAGGAAAGUAAUGGACCAG | 457 | NM_001285406.1_ | 69-89 | ACUGGUCCAUUACUUUCCUUC | 536 | NM_001285406.1_ | 67-89 |
| 266799.1 | U | | 69-89_s | | UG | | 67-89_as | |
| AD- | AGGAAAGUAAUGGACCAGUG | 458 | NM_001285406.1_ | 71-91 | UCACUGGUCCAUUACUUUCCU | 537 | NM_001285406.1_ | 69-91 |
| 266801.1 | A | | 71-91_s | | UC | | 69-91_as | |
| AD- | GGAAAGUAAUGGACCAGUGA | 459 | NM_001285406.1_ | 72-92 | UUCACUGGUCCAUUACUUUCC | 538 | NM_001285406.1_ | 70-92 |
| 266802.1 | A | | 72-92_s | | UU | | 70-92_as | |
| AD- | GAAAGUAAUGGACCAGUGAA | 460 | NM_001285406.1_ | 73-93 | AUUCACUGGUCCAUUACUUUC | 539 | NM_001285406.1_ | 71-93 |
| 266803.1 | U | | 73-93_G21U_s | | CU | | 71-93_C1A_as | |
| AD- | AAAGUAAUGGACCAGUGAAG | 461 | NM_001285406.1_ | 74-94 | ACUUCACUGGUCCAUUACUUU | 540 | NM_001285406.1_ | 72-94 |
| 266804.1 | U | | 74-94_G21U_s | | CC | | 72-94_C1A_as | |
| AD- | AAGUAAUGGACCAGUGAAGG | 462 | NM_001285406.1_ | 75-95 | ACCUUCACUGGUCCAUUACUU | 541 | NM_001285406.1_ | 73-95 |
| 266805.1 | U | | 75-95_s | | UC | | 73-95_as | |
| AD- | AGUAAUGGACCAGUGAAGGU | 463 | NM_001285406.1_ | 76-96 | AACCUUCACUGGUCCAUUACU | 542 | NM_001285406.1_ | 74-96 |
| 266806.1 | U | | 76-96_G21U_s | | UU | | 74-96_C1A_as | |
| AD- | UAAUGGACCAGUGAAGGUGU | 93 | NM_001285406.1_ | 78-98 | AACACCUUCACUGGUCCAUUA | 176 | NM_001285406.1_ | 76-98 |
| 266808.2 | U | | 78-98_G21U_s | | CU | | 76-98_C1A_as | |
| AD- | UGAAGGCCUGCAUGGAUUCC | 464 | NM_001285406.1_ | 120-140 | UGGAAUCCAUGCAGGCCUUCA | 543 | NM_001285406.1_ | 118-140 |
| 266832.1 | A | | 120-140_s | | GU | | 118-140_as | |
| AD- | GAAGGCCUGCAUGGAUUCCA | 465 | NM_001285406.1_ | 121-141 | AUGGAAUCCAUGCAGGCCUUC | 544 | NM_001285406.1_ | 119-141 |
| 266834.1 | U | | 121-141_s | | AG | | 119-141_as | |
| AD- | AGGCCUGCAUGGAUUCCAUG | 466 | NM_001285406.1_ | 123-143 | ACAUGGAAUCCAUGCAGGCCU | 545 | NM_001285406.1_ | 121-143 |
| 266836.1 | U | | 123-143_s | | UC | | 121-143_as | |
| AD- | GGCCUGCAUGGAUUCCAUGU | 467 | NM_001285406.1_ | 124-144 | AACAUGGAAUCCAUGCAGGCC | 546 | NM_001285406.1_ | 122-144 |
| 266837.1 | U | | 124-144_s | | UU | | 122-144_as | |
| AD- | GCCUGCAUGGAUUCCAUGUU | 468 | NM_001285406.1_ | 125-145 | AAACAUGGAAUCCAUGCAGGC | 547 | NM_001285406.1_ | 123-145 |
| 266838.1 | U | | 125-145_C21U_s | | CU | | 123-145_G1A_as | |
| AD- | CCUGCAUGGAUUCCAUGUUC | 469 | NM_001285406.1_ | 126-146 | UGAACAUGGAAUCCAUGCAGG | 548 | NM_001285406.1_ | 124-146 |
| 266839.1 | A | | 126-146_s | | CC | | 124-146_as | |
| AD- | CUGCAUGGAUUCCAUGUUCA | 470 | NM_001285406.1_ | 127-147 | AUGAACAUGGAAUCCAUGCAG | 549 | NM_001285406.1_ | 125-147 |
| 266840.1 | U | | 127-147_s | | GC | | 125-147_as | |
| AD- | UGCAUGGAUUCCAUGUUCAU | 99 | NM_001285406.1_ | 128-148 | AAUGAACAUGGAAUCCAUGCA | 182 | NM_001285406.1_ | 126-148 |
| 266841.3 | U | | 128-148_C21U_s | | GG | | 126-148_G1A_as | |
| AD- | ACCAGUGCAGGUCCUCACUU | 43 | NM_001285406.1_ | 175-195 | AAAGUGAGGACCUGCACUGGU | 126 | NM_001285406.1_ | 173-195 |
| 266886.2 | U | | 175-195_s | | AC | | 173-195_as | |
| AD- | CCAGUGCAGGUCCUCACUUU | 75 | NM_001285406.1_ | 176-196 | UAAAGUGAGGACCUGCACUGG | 158 | NM_001285406.1_ | 174-196 |
| 266887.3 | A | | 176-196_s | | UA | | 174-196_as | |
| AD- | CAGUGCAGGUCCUCACUUUA | 54 | NM_001285406.1_ | 177-197 | UUAAAGUGAGGACCUGCACUG | 137 | NM_001285406.1_ | 175-197 |
| 266888.2 | A | | 177-197_s | | GU | | 175-197_as | |
| AD- | GUGCAGGUCCUCACUUUAAU | 92 | NM_001285406.1_ | 179-199 | AAUUAAAGUGAGGACCUGCAC | 175 | NM_001285406.1_ | 177-199 |
| 266890.3 | U | | 179-199_C21U_s | | UG | | 177-199_G1A_as | |
| AD- | UGCAGGUCCUCACUUUAAUC | 39 | NM_001285406.1_ | 180-200 | AGAUUAAAGUGAGGACCUGCA | 122 | NM_001285406.1_ | 178-200 |
| 266891.2 | U | | 180-200_C21U_s | | CU | | 178-200_G1A_as_ | |
| AD- | GCAGGUCCUCACUUUAAUCC | 97 | NM_001285406.1_ | 181-201 | AGGAUUAAAGUGAGGACCUGC | 180 | NM_001285406.1_ | 179-201 |
| 266892.2 | U | | 181-201_s | | AC | | 179-201_as | |
| AD- | CUCACUUUAAUCCUCUAUCC | 50 | NM_001285406.1_ | 188-208 | UGGAUAGAGGAUUAAAGUGAG | 133 | NM_001285406.1_ | 186-208 |
| 266899.2 | A | | 188-208_s | | GA | | 186-208_as | |
| AD- | UCACUUUAAUCCUCUAUCCA | 82 | NM_001285406.1_ | 189-209 | AUGGAUAGAGGAUUAAAGUGA | 165 | NM_001285406.1_ | 187-209 |
| 266900.3 | U | | 189-209_G21U_s | | GG | | 187-209_C1A_as | |
| AD- | CACUUUAAUCCUCUAUCCAG | 71 | NM_001285406.1_ | 190-210 | UCUGGAUAGAGGAUUAAAGUG | 154 | NM_001285406.1_ | 188-210 |
| 266901.2 | A | | 190-210_s | | AG | | 188-210_as | |
| AD- | GGUGGGCCAAAGGAUGAAGA | 471 | NM_001285406.1_ | 217-237 | AUCUUCAUCCUUUGGCCCACC | 550 | NM_001285406.1_ | 215-237 |
| 266928.1 | U | | 217-237_G21U_s | | GU | | 215-237_C1A_as | |
| AD- | GAUGAAGAGAGGCAUGUUGG | 472 | NM_011434.1_345- | 345-365 | UCCAACAUGCCUCUCUUCAUC | 551 | NM_011434.1 | 343-365 |
| 266934.1 | A | | 365_s | | CU | | | |
| AD- | CAAAGGAUGAAGAGAGGCAU | 473 | NM_001285406.1_ | 224-244 | AAUGCCUCUCUUCAUCCUUUG | 552 | NM_001285406.1_ | 222-244 |
| 266936.1 | U | | 224-244_G21U_s | | GC | | 222-244_C1A_as | |
| AD- | AAGGAUGAAGAGAGGCAUGU | 474 | NM_001285406.1_ | 226-246 | AACAUGCCUCUCUUCAUCCUU | 553 | NM_001285406.1_ | 224-246 |
| 266938.1 | U | | 226-246_s | | UG | | 224-246_as | |
| AD- | AGGAUGAAGAGAGGCAUGUU | 475 | NM_001285406.1_ | 227-247 | AAACAUGCCUCUCUUCAUCCU | 554 | NM_001285406.1_ | 225-247 |
| 266939.1 | U | | 227-247_G21U_s | | UU | | 225-247_C1A_as | |
| AD- | GGAUGAAGAGAGGCAUGUUG | 476 | NM_001285406.1_ | 228-248 | ACAACAUGCCUCUCUUCAUCC | 555 | NM_001285406.1_ | 226-248 |
| 266940.1 | U | | 228-248_G21U_s | | UU | | 226-248_C1A_as | |
| AD- | AUGAAGAGAGGCAUGUUGGA | 477 | NM_001285406.1_ | 230-250 | AUCCAACAUGCCUCUCUUCAU | 556 | NM_001285406.1_ | 228-250 |
| 266941.1 | U | | 230-250_G21U_s | | CC | | 228-250_C1A_as | |
| AD- | AAGAGAGGCAUGUUGGAGAC | 478 | NM_001285406.1_ | 233-253 | AGUCUCCAACAUGCCUCUCUU | 557 | NM_001285406.1_ | 231-253 |
| 266943.1 | U | | 233-253_C21U_s | | CA | | 231-253_G1A_as | |
| AD- | GAUGACUUGGGCAAAGGUGG | 479 | NM_011434.1_489- | 489-509 | UCCACCUUUGCCCAAGUCAUC | 558 | NM_011434.1 | 487-509 |
| 267035.1 | A | | 509_s | | UG | | | |
| AD- | GUGGUCCAUGAAAAAGCAGA | 480 | NM_001285406.1_ | 355-375 | AUCUGCUUUUUCAUGGACCAC | 559 | NM_001285406.1_ | 353-375 |
| 267058.1 | U | | 355-375_s | | CA | | 353-375_as | |
| AD- | UGGUCCAUGAAAAAGCAGAU | 481 | NM_001285406.1_ | 356-376 | AAUCUGCUUUUUCAUGGACCA | 560 | NM_001285406.1_ | 354-376 |
| 267059.1 | U | | 356-376_G21U_s | | CC | | 354-376_C1A_as | |
| AD- | GGUCCAUGAAAAAGCAGAUG | 482 | NM_001285406.1_ | 357-377 | UCAUCUGCUUUUUCAUGGACC | 561 | NM_001285406.1_ | 355-377 |
| 267060.1 | A | | 357-377_s | | AC | | 355-377_as | |
| AD- | GCAGAUGACUUGGGCAAAGG | 483 | NM_001285406.1_ | 370-390 | ACCUUUGCCCAAGUCAUCUGC | 562 | NM_001285406.1_ | 368-390 |
| 267073.1 | U | | 370-390_s | | UU | | 368-390_as | |
| AD- | AGAUGACUUGGGCAAAGGUG | 484 | NM_001285406.1_ | 372-392 | ACACCUUUGCCCAAGUCAUCU | 563 | NM_001285406.1_ | 370-392 |
| 267075.1 | U | | 372-392_G21U_s | | GC | | 370-392_C1A_as | |
| AD- | ACUUGGGCAAAGGUGGAAAU | 485 | NM_001285406.1_ | 377-397 | AAUUUCCACCUUUGCCCAAGU | 564 | NM_001285406.1_ | 375-397 |
| 267076.1 | U | | 377-397_G21U_s | | CA | | 375-397_C1A_as | |
| AD- | GCUUGUGGUGUAAUUGGGAU | 486 | NM_001285406.1_ | 436-456 | AAUCCCAAUUACACCACAAGC | 565 | NM_001285406.1_ | 434-456 |
| 267118.1 | U | | 436-456_C21U_s | | CA | | 434-456_G1A_as | |
| AD- | CUUGUGGUGUAAUUGGGAUC | 487 | NM_001285406.1_ | 437-457 | AGAUCCCAAUUACACCACAAG | 566 | NM_001285406.1_ | 435-457 |
| 267119.1 | U | | 437-457_G21U_s | | CC | | 435-457_C1A_as | |
| AD- | UUGUGGUGUAAUUGGGAUCG | 488 | NM_001285406.1_ | 438-458 | ACGAUCCCAAUUACACCACAA | 567 | NM_001285406.1_ | 436-458 |
| 267120.1 | U | | 438-458_C21U_s | | GC | | 436-458_G1A_as | |
| AD- | UGUGGUGUAAUUGGGAUCGC | 489 | NM_001285406.1_ | 439-459 | AGCGAUCCCAAUUACACCACA | 568 | NM_001285406.1_ | 437-459 |
| 267121.1 | U | | 439-459_C21U_s | | AG | | 437-459_G1A_as | |
| AD- | GUGGUGUAAUUGGGAUCGCC | 490 | NM_001285406.1_ | 440-460 | AGGCGAUCCCAAUUACACCAC | 569 | NM_001285406.1_ | 438-460 |
| 267122.1 | U | | 440-460_C21U_s | | AA | | 438-460_G1A_as | |
| AD- | UGCAGGGCAUCAUCAAUUUC | 491 | NM_000454.4_192- | 192-212 | AGAAAUUGAUGAUGCCCUGCA | 570 | NM_000454.4_190- | 190-212 |
| 295644.1 | U | | 212_G21U_s | | CU | | 212_C1A_as | |
| AD- | GCAGGGCAUCAUCAAUUUCG | 492 | NM_000454.4_193- | 193-213 | UCGAAAUUGAUGAUGCCCUGC | 571 | NM_000454.4_191- | 191-213 |
| 295645.1 | A | | 213_s | | AC | | 213_as | |
| AD- | CAGGGCAUCAUCAAUUUCGA | 493 | NM_000454.4_194- | 194-214 | AUCGAAAUUGAUGAUGCCCUG | 572 | NM_000454.4_192- | 192-214 |
| 295646.1 | U | | 214_G21U_s | | CA | | 214_C1A_as | |
| AD- | AGGGCAUCAUCAAUUUCGAG | 494 | NM_000454.4_195- | 195-215 | ACUCGAAAUUGAUGAUGCCCU | 573 | NM_000454.4_193- | 193-215 |
| 295647.1 | U | | 215_C21U_s | | GC | | 215_G1A_as | |
| AD- | GGGCAUCAUCAAUUUCGAGC | 495 | NM_000454.4_196- | 196-216 | UGCUCGAAAUUGAUGAUGCCC | 574 | NM_000454.4_194- | 194-216 |
| 295648.1 | A | | 216_s | | UG | | 216_as | |
| AD- | GGCAUCAUCAAUUUCGAGCA | 496 | NM_000454.4_197- | 197-217 | AUGCUCGAAAUUGAUGAUGCC | 575 | NM_000454.4_195- | 195-217 |
| 295649.1 | U | | 217_G21U_s | | CU | | 217_C1A_as | |
| AD- | CAUCAUCAAUUUCGAGCAGA | 497 | NM_000454.4_199- | 199-219 | UUCUGCUCGAAAUUGAUGAUG | 576 | NM_000454.4_197- | 197-219 |
| 295651.1 | A | | 219_s | | CC | | 219_as | |
| AD- | AUCAUCAAUUUCGAGCAGAA | 498 | NM_000454.4_200- | 200-220 | AUUCUGCUCGAAAUUGAUGAU | 577 | NM_000454.4_198- | 198-220 |
| 295652.1 | U | | 220_G21U_s | | GC | | 220_C1A_as | |
| AD- | UCAUCAAUUUCGAGCAGAAG | 499 | NM_000454.4_201- | 201-221 | ACUUCUGCUCGAAAUUGAUGA | 578 | NM_000454.4_199- | 199-221 |
| 295653.1 | U | | 221_G21U_s | | UG | | 221_C1A_as | |
| AD- | AUUAAAGGACUGACUGAAGG | 500 | NM_000454.4_254- | 254-274 | ACCUUCAGUCAGUCCUUUAAU | 579 | NM_000454.4_252- | 252-274 |
| 295661.1 | U | | 274_C21U_s | | GC | | 274_G1A_as | |
| AD- | CAUGUUCAUGAGUUUGGAGA | 501 | NM_000454.4_287- | 287-307 | AUCUCCAAACUCAUGAACAUG | 580 | NM_000454.4_285- | 285-307 |
| 295685.1 | U | | 307_s | | GA | | 307_as | |
| AD- | GUUCAUGAGUUUGGAGAUAA | 502 | NM_000454.4_290- | 290-310 | AUUAUCUCCAAACUCAUGAAC | 581 | NM_000454.4_288- | 288-310 |
| 295688.1 | U | | 310_s | | AU | | 310_as | |
| AD- | UUCAUGAGUUUGGAGAUAAU | 503 | NM_000454.4_291- | 291-311 | UAUUAUCUCCAAACUCAUGAA | 582 | NM_000454.4_289- | 289-311 |
| 295689.1 | A | | 311_s | | CA | | 311_as | |
| AD- | AUGAGUUUGGAGAUAAUACA | 504 | NM_000454.4_294- | 294-314 | AUGUAUUAUCUCCAAACUCAU | 583 | NM_000454.4_292- | 292-314 |
| 295692.1 | U | | 314_G21U_s | | GA | | 314_C1A_as | |
| AD- | UGUGUCUAUUGAAGAUUCUG | 505 | NM_000454.4_439- | 439-459 | ACAGAAUCUUCAAUAGACACA | 584 | NM_000454.4_437- | 437-459 |
| 295795.1 | U | | 459_s | | UC | | 459_as | |
| AD- | GUGUCUAUUGAAGAUUCUGU | 506 | NM_000454.4_440- | 440-460 | AACAGAAUCUUCAAUAGACAC | 585 | NM_000454.4_438- | 438-460 |
| 295796.1 | U | | 460_G21U_s | | AU | | 460_C1A_as | |
| AD- | UGGUGGUCCAUGAAAAAGCA | 507 | NM_001285406.1_ | 353-373 | AUGCUUUUUCAUGGACCACCA | 586 | NM_001285406.1 | 351-373 |
| 295827.1 | U | | 353-373_G21U_s | | GU | | | |
| AD- | GGUGGUCCAUGAAAAAGCAG | 508 | NM_001285406.1_ | 354-374 | UCUGCUUUUUCAUGGACCACC | 587 | NM_001285406.1 | 352-374 |
| 295828.1 | A | | 354-374_s | | AG | | | |
| AD- | GAGACCAUUGCAUCAUUGGC | 509 | NM_000454.4_474- | 474-494 | AGCCAAUGAUGCAAUGGUCUC | 588 | NM_000454.4_472- | 472-494 |
| 295831.1 | U | | 494_C21U_s | | CU | | 494_G1A_as | |
| AD- | ACUGGUGGUCCAUGAAAAAG | 510 | NM_000454.4_499- | 499-519 | ACUUUUUCAUGGACCACCAGU | 589 | NM_000454.4_497- | 497-519 |
| 295856.1 | U | | 519_C21U_s | | GU | | 519_G1A_as | |
| AD- | CUGGUGGUCCAUGAAAAAGC | 511 | NM_000454.4_500- | 500-520 | UGCUUUUUCAUGGACCACCAG | 590 | NM_000454.4_498- | 498-520 |
| 295857.1 | A | | 520_s | | UG | | 520_as | |
| AD- | AGGUGGAAAUGAAGAAAGUA | 512 | NM_000454.4_535- | 535-555 | AUACUUUCUUCAUUUCCACCU | 591 | NM_000454.4_533- | 533-555 |
| 295858.1 | U | | 555_C21U_s | | UU | | 555_G1A_as | |
| AD- | GAAAGUACAAAGACAGGAAA | 513 | NM_000454.4_548- | 548-568 | AUUUCCUGUCUUUGUACUUUC | 592 | NM_000454.4_546- | 546-568 |
| 295867.1 | U | | 568_C21U_s | | UU | | 568_G1A_as | |
| AD- | AAAGUACAAAGACAGGAAAC | 514 | NM_000454.4_549- | 549-569 | AGUUUCCUGUCUUUGUACUUU | 593 | NM_000454.4_547- | 547-569 |
| 295868.1 | U | | 569_G21U_s | | CU | | 569_C1A_as | |
| AD- | AAGUACAAAGACAGGAAACG | 515 | NM_000454.4_550- | 550-570 | ACGUUUCCUGUCUUUGUACUU | 594 | NM_000454.4_548- | 548-570 |
| 295869.1 | U | | 570_C21U_s | | UC | | 570_G1A_as | |
| AD- | AGUACAAAGACAGGAAACGC | 516 | NM_000454.4_551- | 551-571 | AGCGUUUCCUGUCUUUGUACU | 595 | NM_000454.4_549- | 549-571 |
| 295870.1 | U | | 571_s | | UU | | 571_as | |
| AD- | GUACAAAGACAGGAAACGCU | 517 | NM_000454.4_552- | 552-572 | AAGCGUUUCCUGUCUUUGUAC | 596 | NM_000454.4_550- | 550-572 |
| 295871.1 | U | | 572_G21U_s | | UU | | 572_C1A_as | |
| AD- | UACAAAGACAGGAAACGCUG | 518 | NM_000454.4_553- | 553-573 | ACAGCGUUUCCUGUCUUUGUA | 597 | NM_000454.4_551- | 551-573 |
| 295872.1 | U | | 573_G21U_s | | CU | | 573_C1A_as | |
| AD- | CAAAGACAGGAAACGCUGGA | 519 | NM_000454.4_555- | 555-575 | UUCCAGCGUUUCCUGUCUUUG | 598 | NM_000454.4_553- | 553-575 |
| 295874.1 | A | | 575_s | | UA | | 575_as | |
| AD- | UGGCUUGUGGUGUAAUUGGG | 520 | NM_001285406.1_ | 434-454 | UCCCAAUUACACCACAAGCCA | 599 | NM_001285406.1 | 432-454 |
| 295879.1 | A | | 434-454_s | | AA | | | |
| AD- | GGCUUGUGGUGUAAUUGGGA | 521 | NM_001285406.1_ | 435-455 | AUCCCAAUUACACCACAAGCC | 600 | NM_001285406.1 | 433-455 |
| 295880.1 | U | | 435-455_s | | AA | | | |
| AD- | GUCGUUUGGCUUGUGGUGUA | 522 | NM_000454.4_576- | 576-596 | UUACACCACAAGCCAAACGAC | 601 | NM_000454.4_574- | 574-596 |
| 295897.1 | A | | 596_s | | UU | | 596_as | |
| AD- | UCGUUUGGCUUGUGGUGUAA | 523 | NM_000454.4_577- | 577-597 | AUUACACCACAAGCCAAACGA | 602 | NM_000454.4_575- | 575-597 |
| 295898.1 | U | | 597_s | | CU | | 597_as | |
| AD- | CGUUUGGCUUGUGGUGUAAU | 524 | NM_000454.4_578- | 578-598 | AAUUACACCACAAGCCAAACG | 603 | NM_000454.4_576- | 576-598 |
| 295899.1 | U | | 598_s | | AC | | 598_as | |
| AD- | GUUUGGCUUGUGGUGUAAUU | 525 | NM_000454.4_579- | 579-599 | AAAUUACACCACAAGCCAAAC | 604 | NM_000454.4_577- | 577-599 |
| 295900.1 | U | | 599_G21U_s | | GA | | 599_C1A_as | |
| AD- | UUUGGCUUGUGGUGUAAUUG | 526 | NM_000454.4_580- | 580-600 | ACAAUUACACCACAAGCCAAA | 605 | NM_000454.4_578- | 578-600 |
| 295901.1 | U | | 600_G21U_s | | CG | | 600_C1A_as | |
| AD- | UUGGCUUGUGGUGUAAUUGG | 527 | NM_000454.4_581- | 581-601 | ACCAAUUACACCACAAGCCAA | 606 | NM_000454.4_579- | 579-601 |
| 295902.1 | U | | 601_G21U_s | | AC | | 601_C1A_as | |
| AD- | GUAAUUGGGAUCGCCCAAUA | 528 | NM_000454.4_593- | 593-613 | UUAUUGGGCGAUCCCAAUUAC | 607 | NM_000454.4_591- | 591-613 |
| 295904.1 | A | | 613_s | | AC | | 613_as | |

TABLE 5
Modified Sense and Antisense Strand Sequences of Superoxide Dismutase 1 dsRNA Agents

| | | SEQ ID | | SEQ ID | | SEQ ID |
|---|---|---|---|---|---|---|
| Duplex Name | Sense Sequence 5′ to 3′ | NO: | Antiense Sequence 5′ to 3′ | NO: | mRNA Target Sequence 5′ to 3′ | NO: |
| AD-135962.1 | asusgacuUfgGfGfCfaaagguggaaL96 | 608 | usUfsccaCfcUfUfugccCfaAfgucauscsu | 687 | AGAUGACUUGGGCAAAGGUGGAA | 766 |
| AD-135963.1 | usgsacuuGfgGfCfAfaagguggaaaL96 | 609 | usUfsuccAfcCfUfuugcCfcAfagucasusc | 688 | GAUGACUUGGGCAAAGGUGGAAA | 767 |
| AD-135964.1 | gsascuugGfgCfAfAfagguggaaauL96 | 610 | asUfsuucCfaCfCfuuugCfcCfaagucsasu | 689 | AUGACUUGGGCAAAGGUGGAAAU | 768 |
| AD-135967.5 | ususgggcAfaAfGfGfuggaaaugaaL96 | 269 | usUfscauUfuCfCfaccuUfuGfcccaasgsu | 352 | ACUUGGGCAAAGGUGGAAAUGAA | 435 |
| AD-135974.3 | asasggugGfaAfAfUfgaagaaaguaL96 | 611 | usAfscuuUfcUfUfcauuUfcCfaccuususg | 690 | CAAAGGUGGAAAUGAAGAAAGUA | 769 |
| AD-266788.1 | asasuuucGfaGfCfAfgaaggaaaguL96 | 612 | asCfsuuuCfcUfUfcugcUfcGfaaauusgsa | 691 | UCAAUUUCGAGCAGAAGGAAAGU | 770 |
| AD-266789.2 | asusuucgAfgCfAfGfaaggaaaguaL96 | 213 | usAfscuuUfcCfUfucugCfuCfgaaaususg | 296 | CAAUUUCGAGCAGAAGGAAAGUA | 379 |
| AD-266790.2 | ususucgaGfcAfGfAfaggaaaguaaL96 | 255 | usUfsacuUfuCfCfuucuGfcUfcgaaasusu | 338 | AAUUUCGAGCAGAAGGAAAGUAA | 421 |
| AD-266791.3 | ususcgagCfaGfAfAfggaaaguaauL96 | 212 | asUfsuacUfuUfCfcuucUfgCfucgaasasu | 295 | AUUUCGAGCAGAAGGAAAGUAAU | 378 |
| AD-266794.1 | gsasgcagAfaGfGfAfaaguaauggaL96 | 613 | usCfscauUfaCfUfuuccUfuCfugcucsgsa | 692 | UCGAGCAGAAGGAAAGUAAUGGA | 771 |
| AD-266798.1 | asgsaaggAfaAfGfUfaauggaccauL96 | 614 | asUfsgguCfcAfUfuacuUfuCfcuucusgsc | 693 | GCAGAAGGAAAGUAAUGGACCAG | 772 |
| AD-266799.1 | gsasaggaAfaGfUfAfauggaccaguL96 | 615 | asCfsuggUfcCfAfuuacUfuUfccuucsusg | 694 | CAGAAGGAAAGUAAUGGACCAGU | 773 |
| AD-266801.1 | asgsgaaaGfuAfAfUfggaccagugaL96 | 616 | usCfsacuGfgUfCfcauuAfcUfuuccususc | 695 | GAAGGAAAGUAAUGGACCAGUGA | 774 |
| AD-266802.1 | gsgsaaagUfaAfUfGfgaccagugaaL96 | 617 | usUfscacUfgGfUfccauUfaCfuuuccsusu | 696 | AAGGAAAGUAAUGGACCAGUGAA | 775 |
| AD-266803.1 | gsasaaguAfaUfGfGfaccagugaauL96 | 618 | asUfsucaCfuGfGfuccaUfuAfcuuucscsu | 697 | AGGAAAGUAAUGGACCAGUGAAG | 776 |
| AD-266804.1 | asasaguaAfuGfGfAfccagugaaguL96 | 619 | asCfsuucAfcUfGfguccAfuUfacuuuscsc | 698 | GGAAAGUAAUGGACCAGUGAAGG | 777 |
| AD-266805.1 | asasguaaUfgGfAfCfcagugaagguL96 | 620 | asCfscuuCfaCfUfggucCfaUfuacuususc | 699 | GAAAGUAAUGGACCAGUGAAGGU | 778 |
| AD-266806.1 | asgsuaauGfgAfCfCfagugaagguuL96 | 621 | asAfsccuUfcAfCfugguCfcAfuuacususu | 700 | AAAGUAAUGGACCAGUGAAGGUG | 779 |
| AD-266808.2 | usasauggAfcCfAfGfugaagguguuL96 | 259 | asAfscacCfuUfCfacugGfuCfcauuascsu | 342 | AGUAAUGGACCAGUGAAGGUGUG | 425 |
| AD-266832.1 | usgsaaggCfcUfGfCfauggauuccaL96 | 622 | usGfsgaaUfcCfAfugcaGfgCfcuucasgsu | 701 | ACUGAAGGCCUGCAUGGAUUCCA | 780 |
| AD-266834.1 | gsasaggcCfuGfCfAfuggauuccauL96 | 623 | asUfsggaAfuCfCfaugcAfgGfccuucsasg | 702 | CUGAAGGCCUGCAUGGAUUCCAU | 781 |
| AD-266836.1 | asgsgccuGfcAfUfGfgauuccauguL96 | 624 | asCfsaugGfaAfUfccauGfcAfggccususc | 703 | GAAGGCCUGCAUGGAUUCCAUGU | 782 |
| AD-266837.1 | gsgsccugCfaUfGfGfauuccauguuL96 | 625 | asAfscauGfgAfAfuccaUfgCfaggccsusu | 704 | AAGGCCUGCAUGGAUUCCAUGUU | 783 |
| AD-266838.1 | gscscugcAfuGfGfAfuuccauguuuL96 | 626 | asAfsacaUfgGfAfauccAfuGfcaggcscsu | 705 | AGGCCUGCAUGGAUUCCAUGUUC | 784 |
| AD-266839.1 | cscsugcaUfgGfAfUfuccauguucaL96 | 627 | usGfsaacAfuGfGfaaucCfaUfgcaggscsc | 706 | GGCCUGCAUGGAUUCCAUGUUCA | 785 |
| AD-266840.1 | csusgcauGfgAfUfUfccauguucauL96 | 628 | asUfsgaaCfaUfGfgaauCfcAfugcagsgsc | 707 | GCCUGCAUGGAUUCCAUGUUCAU | 786 |
| AD-266841.3 | usgscaugGfaUfUfCfcauguucauuL96 | 265 | asAfsugaAfcAfUfggaaUfcCfaugcasgsg | 348 | CCUGCAUGGAUUCCAUGUUCAUC | 431 |
| AD-266886.2 | ascscaguGfcAfGfGfuccucacuuuL96 | 209 | asAfsaguGfaGfGfaccuGfcAfcuggusasc | 292 | GUACCAGUGCAGGUCCUCACUUU | 375 |
| AD-266887.3 | cscsagugCfaGfGfUfccucacuuuaL96 | 241 | usAfsaagUfgAfGfgaccUfgCfacuggsusa | 324 | UACCAGUGCAGGUCCUCACUUUA | 407 |
| AD-266888.2 | csasgugcAfgGfUfCfcucacuuuaaL96 | 220 | usUfsaaaGfuGfAfggacCfuGfcacugsgsu | 303 | ACCAGUGCAGGUCCUCACUUUAA | 386 |
| AD-266890.3 | gsusgcagGfuCfCfUfcacuuuaauuL96 | 258 | asAfsuuaAfaGfUfgaggAfcCfugcacsusg | 341 | CAGUGCAGGUCCUCACUUUAAUC | 424 |
| AD-266891.2 | usgscaggUfcCfUfCfacuuuaaucuL96 | 205 | asGfsauuAfaAfGfugagGfaCfcugcascsu | 288 | AGUGCAGGUCCUCACUUUAAUCC | 371 |
| AD-266892.2 | gscsagguCfcUfCfAfcuuuaauccuL96 | 263 | asGfsgauUfaAfAfgugaGfgAfccugcsasc | 346 | GUGCAGGUCCUCACUUUAAUCCU | 429 |
| AD-266899.2 | csuscacuUfuAfAfUfccucuauccaL96 | 216 | usGfsgauAfgAfGfgauuAfaAfgugagsgsa | 299 | UCCUCACUUUAAUCCUCUAUCCA | 382 |
| AD-266900.3 | uscsacuuUfaAfUfCfcucuauccauL96 | 248 | asUfsggaUfaGfAfggauUfaAfagugasgsg | 331 | CCUCACUUUAAUCCUCUAUCCAG | 414 |
| AD-266901.2 | csascuuuAfaUfCfCfucuauccagaL96 | 237 | usCfsuggAfuAfGfaggaUfuAfaagugsasg | 320 | CUCACUUUAAUCCUCUAUCCAGA | 403 |
| AD-266928.1 | gsgsugggCfcAfAfAfggaugaagauL96 | 629 | asUfscuuCfaUfCfcuuuGfgCfccaccsgsu | 708 | ACGGUGGGCCAAAGGAUGAAGAG | 787 |
| AD-266934.1 | gsasugaaGfaGfAfGfgcauguuggaL96 | 630 | usCfscaaCfaUfGfccucUfcUfucaucscsu | 709 | AGGAUGAAGAGAGGCAUGUUGGA | 788 |
| AD-266936.1 | csasaaggAfuGfAfAfgagaggcauuL96 | 631 | asAfsugcCfuCfUfcuucAfuCfcuuugsgsc | 710 | GCCAAAGGAUGAAGAGAGGCAUG | 789 |
| AD-266938.1 | asasggauGfaAfGfAfgaggcauguuL96 | 632 | asAfscauGfcCfUfcucuUfcAfuccuususg | 711 | CAAAGGAUGAAGAGAGGCAUGUU | 790 |
| AD-266939.1 | asgsgaugAfaGfAfGfaggcauguuuL96 | 633 | asAfsacaUfgCfCfucucUfuCfauccususu | 712 | AAAGGAUGAAGAGAGGCAUGUUG | 791 |
| AD-266940.1 | gsgsaugaAfgAfGfAfggcauguuguL96 | 634 | asCfsaacAfuGfCfcucuCfuUfcauccsusu | 713 | AAGGAUGAAGAGAGGCAUGUUGG | 792 |
| AD-266941.1 | asusgaagAfgAfGfGfcauguuggauL96 | 635 | asUfsccaAfcAfUfgccuCfuCfuucauscsc | 714 | GGAUGAAGAGAGGCAUGUUGGAG | 793 |
| AD-266943.1 | asasgagaGfgCfAfUfguuggagacuL96 | 636 | asGfsucuCfcAfAfcaugCfcUfcucuuscsa | 715 | UGAAGAGAGGCAUGUUGGAGACC | 794 |
| AD-267035.1 | gsasugacUfuGfGfGfcaaagguggaL96 | 637 | usCfscacCfuUfUfgcccAfaGfucaucsusg | 716 | CAGAUGACUUGGGCAAAGGUGGA | 795 |
| AD-267058.1 | gsusggucCfaUfGfAfaaaagcagauL96 | 638 | asUfscugCfuUfUfuucaUfgGfaccacscsa | 717 | UGGUGGUCCAUGAAAAAGCAGAU | 796 |
| AD-267059.1 | usgsguccAfuGfAfAfaaagcagauuL96 | 639 | asAfsucuGfcUfUfuuucAfuGfgaccascsc | 718 | GGUGGUCCAUGAAAAAGCAGAUG | 797 |
| AD-267060.1 | gsgsuccaUfgAfAfAfaagcagaugaL96 | 640 | usCfsaucUfgCfUfuuuuCfaUfggaccsasc | 719 | GUGGUCCAUGAAAAAGCAGAUGA | 798 |
| AD-267073.1 | gscsagauGfaCfUfUfgggcaaagguL96 | 641 | asCfscuuUfgCfCfcaagUfcAfucugcsusu | 720 | AAGCAGAUGACUUGGGCAAAGGU | 799 |
| AD-267075.1 | asgsaugaCfuUfGfGfgcaaagguguL96 | 642 | asCfsaccUfuUfGfcccaAfgUfcaucusgsc | 721 | GCAGAUGACUUGGGCAAAGGUGG | 800 |
| AD-267076.1 | ascsuuggGfcAfAfAfgguggaaauuL96 | 643 | asAfsuuuCfcAfCfcuuuGfcCfcaaguscsa | 722 | UGACUUGGGCAAAGGUGGAAAUG | 801 |
| AD-267118.1 | gscsuuguGfgUfGfUfaauugggauuL96 | 644 | asAfsuccCfaAfUfuacaCfcAfcaagcscsa | 723 | UGGCUUGUGGUGUAAUUGGGAUC | 802 |
| AD-267119.1 | csusugugGfuGfUfAfauugggaucuL96 | 645 | asGfsaucCfcAfAfuuacAfcCfacaagscsc | 724 | GGCUUGUGGUGUAAUUGGGAUCG | 803 |
| AD-267120.1 | ususguggUfgUfAfAfuugggaucguL96 | 646 | asCfsgauCfcCfAfauuaCfaCfcacaasgsc | 725 | GCUUGUGGUGUAAUUGGGAUCGC | 804 |
| AD-267121.1 | usgsugguGfuAfAfUfugggaucgcuL96 | 647 | asGfscgaUfcCfCfaauuAfcAfccacasasg | 726 | CUUGUGGUGUAAUUGGGAUCGCC | 805 |
| AD-267122.1 | gsusggugUfaAfUfUfgggaucgccuL96 | 648 | asGfsgcgAfuCfCfcaauUfaCfaccacsasa | 727 | UUGUGGUGUAAUUGGGAUCGCCC | 806 |
| AD-295644.1 | usgscaggGfcAfUfCfaucaauuucuL96 | 649 | asGfsaaaUfuGfAfugauGfcCfcugcascsu | 728 | AGUGCAGGGCAUCAUCAAUUUCG | 807 |
| AD-295645.1 | gscsagggCfaUfCfAfucaauuucgaL96 | 650 | usCfsgaaAfuUfGfaugaUfgCfccugcsasc | 729 | GUGCAGGGCAUCAUCAAUUUCGA | 808 |
| AD-295646.1 | csasgggcAfuCfAfUfcaauuucgauL96 | 651 | asUfscgaAfaUfUfgaugAfuGfcccugscsa | 730 | UGCAGGGCAUCAUCAAUUUCGAG | 809 |
| AD-295647.1 | asgsggcaUfcAfUfCfaauuucgaguL96 | 652 | asCfsucgAfaAfUfugauGfaUfgcccusgsc | 731 | GCAGGGCAUCAUCAAUUUCGAGC | 810 |
| AD-295648.1 | gsgsgcauCfaUfCfAfauuucgagcaL96 | 653 | usGfscucGfaAfAfuugaUfgAfugcccsusg | 732 | CAGGGCAUCAUCAAUUUCGAGCA | 811 |
| AD-295649.1 | gsgscaucAfuCfAfAfuuucgagcauL96 | 654 | asUfsgcuCfgAfAfauugAfuGfaugccscsu | 733 | AGGGCAUCAUCAAUUUCGAGCAG | 812 |
| AD-295651.1 | csasucauCfaAfUfUfucgagcagaaL96 | 655 | usUfscugCfuCfGfaaauUfgAfugaugscsc | 734 | GGCAUCAUCAAUUUCGAGCAGAA | 813 |
| AD-295652.1 | asuscaucAfaUfUfUfcgagcagaauL96 | 656 | asUfsucuGfcUfCfgaaaUfuGfaugausgsc | 735 | GCAUCAUCAAUUUCGAGCAGAAG | 814 |
| AD-295653.1 | uscsaucaAfuUfUfCfgagcagaaguL96 | 657 | asCfsuucUfgCfUfcgaaAfuUfgaugasusg | 736 | CAUCAUCAAUUUCGAGCAGAAGG | 815 |
| AD-295661.1 | asusuaaaGfgAfCfUfgacugaagguL96 | 658 | asCfscuuCfaGfUfcaguCfcUfuuaausgsc | 737 | GCAUUAAAGGACUGACUGAAGGC | 816 |
| AD-295685.1 | csasuguuCfaUfGfAfguuuggagauL96 | 659 | asUfscucCfaAfAfcucaUfgAfacaugsgsa | 738 | UCCAUGUUCAUGAGUUUGGAGAU | 817 |
| AD-295688.1 | gsusucauGfaGfUfUfuggagauaauL96 | 660 | asUfsuauCfuCfCfaaacUfcAfugaacsasu | 739 | AUGUUCAUGAGUUUGGAGAUAAU | 818 |
| AD-295689.1 | ususcaugAfgUfUfUfggagauaauaL96 | 661 | usAfsuuaUfcUfCfcaaaCfuCfaugaascsa | 740 | UGUUCAUGAGUUUGGAGAUAAUA | 819 |
| AD-295692.1 | asusgaguUfuGfGfAfgauaauacauL96 | 662 | asUfsguaUfuAfUfcuccAfaAfcucausgsa | 741 | UCAUGAGUUUGGAGAUAAUACAG | 820 |
| AD-295795.1 | usgsugucUfaUfUfGfaagauucuguL96 | 663 | asCfsagaAfuCfUfucaaUfaGfacacasusc | 742 | GAUGUGUCUAUUGAAGAUUCUGU | 821 |
| AD-295796.1 | gsusgucuAfuUfGfAfagauucuguuL96 | 664 | asAfscagAfaUfCfuucaAfuAfgacacsasu | 743 | AUGUGUCUAUUGAAGAUUCUGUG | 822 |
| AD-295827.1 | usgsguggUfcCfAfUfgaaaaagcauL96 | 665 | asUfsgcuUfuUfUfcaugGfaCfcaccasgsu | 744 | ACUGGUGGUCCAUGAAAAAGCAU | 823 |
| AD-295828.1 | gsgsugguCfcAfUfGfaaaaagcagaL96 | 666 | usCfsugcUfuUfUfucauGfgAfccaccsasg | 745 | CUGGUGGUCCAUGAAAAAGCAGA | 824 |
| AD-295831.1 | gsasgaccAfuUfGfCfaucauuggcuL96 | 667 | asGfsccaAfuGfAfugcaAfuGfgucucscsu | 746 | AGGAGACCAUUGCAUCAUUGGCC | 825 |
| AD-295856.1 | ascsugguGfgUfCfCfaugaaaaaguL96 | 668 | asCfsuuuUfuCfAfuggaCfcAfccagusgsu | 747 | ACACUGGUGGUCCAUGAAAAAGC | 826 |
| AD-295857.1 | csusggugGfuCfCfAfugaaaaagcaL96 | 669 | usGfscuuUfuUfCfauggAfcCfaccagsusg | 748 | CACUGGUGGUCCAUGAAAAAGCA | 827 |
| AD-295858.1 | asgsguggAfaAfUfGfaagaaaguauL96 | 670 | asUfsacuUfuCfUfucauUfuCfcaccususu | 749 | AAAGGUGGAAAUGAAGAAAGUAC | 828 |
| AD-295867.1 | gsasaaguAfcAfAfAfgacaggaaauL96 | 671 | asUfsuucCfuGfUfcuuuGfuAfcuuucsusu | 750 | AAGAAAGUACAAAGACAGGAAAC | 829 |
| AD-295868.1 | asasaguaCfaAfAfGfacaggaaacuL96 | 672 | asGfsuuuCfcUfGfucuuUfgUfacuuuscsu | 751 | AGAAAGUACAAAGACAGGAAACG | 830 |
| AD-295869.1 | asasguacAfaAfGfAfcaggaaacguL96 | 673 | asCfsguuUfcCfUfgucuUfuGfuacuususc | 752 | GAAAGUACAAAGACAGGAAACGC | 831 |
| AD-295870.1 | asgsuacaAfaGfAfCfaggaaacgcuL96 | 674 | asGfscguUfuCfCfugucUfuUfguacususu | 753 | AAAGUACAAAGACAGGAAACGCU | 832 |
| AD-295871.1 | gsusacaaAfgAfCfAfggaaacgcuuL96 | 675 | asAfsgcgUfuUfCfcuguCfuUfuguacsusu | 754 | AAGUACAAAGACAGGAAACGCUG | 833 |
| AD-295872.1 | usascaaaGfaCfAfGfgaaacgcuguL96 | 676 | asCfsagcGfuUfUfccugUfcUfuuguascsu | 755 | AGUACAAAGACAGGAAACGCUGG | 834 |
| AD-295874.1 | csasaagaCfaGfGfAfaacgcuggaaL96 | 677 | usUfsccaGfcGfUfuuccUfgUfcuuugsusa | 756 | UACAAAGACAGGAAACGCUGGAA | 835 |
| AD-295879.1 | usgsgcuuGfuGfGfUfguaauugggaL96 | 678 | usCfsccaAfuUfAfcaccAfcAfagccasasa | 757 | UUUGGCUUGUGGUGUAAUUGGGA | 836 |
| AD-295880.1 | gsgscuugUfgGfUfGfuaauugggauL96 | 679 | asUfscccAfaUfUfacacCfaCfaagccsasa | 758 | UUGGCUUGUGGUGUAAUUGGGAU | 837 |
| AD-295897.1 | gsuscguuUfgGfCfUfugugguguaaL96 | 680 | usUfsacaCfcAfCfaagcCfaAfacgacsusu | 759 | AAGUCGUUUGGCUUGUGGUGUAA | 838 |
| AD-295898.1 | uscsguuuGfgCfUfUfgugguguaauL96 | 681 | asUfsuacAfcCfAfcaagCfcAfaacgascsu | 760 | AGUCGUUUGGCUUGUGGUGUAAU | 839 |
| AD-295899.1 | csgsuuugGfcUfUfGfugguguaauuL96 | 682 | asAfsuuaCfaCfCfacaaGfcCfaaacgsasc | 761 | GUCGUUUGGCUUGUGGUGUAAUU | 840 |
| AD-295900.1 | gsusuuggCfuUfGfUfgguguaauuuL96 | 683 | asAfsauuAfcAfCfcacaAfgCfcaaacsgsa | 762 | UCGUUUGGCUUGUGGUGUAAUUG | 841 |
| AD-295901.1 | ususuggcUfuGfUfGfguguaauuguL96 | 684 | asCfsaauUfaCfAfccacAfaGfccaaascsg | 763 | CGUUUGGCUUGUGGUGUAAUUGG | 842 |
| AD-295902.1 | ususggcuUfgUfGfGfuguaauugguL96 | 685 | asCfscaaUfuAfCfaccaCfaAfgccaasasc | 764 | GUUUGGCUUGUGGUGUAAUUGGG | 843 |
| AD-295904.1 | gsusaauuGfgGfAfUfcgcccaauaaL96 | 686 | usUfsauuGfgGfCfgaucCfcAfauuacsasc | 765 | GUGUAAUUGGGAUCGCCCAAUAA | 844 |

TABLE 6
Unmodified Sense and Antisense Strand Sequences of Superoxide Dismutase 1 dsRNA Agents

| | | | | Range in | | | | Range in |
|---|---|---|---|---|---|---|---|---|
| | | | | GenBank | | | | GenBank |
| | | | | Acession | | | | Acession |
| | | SEQ | | No. in | | SEQ | | No. in |
| | | ID | | Source | | ID | | Source |
| Duplex Name | Sense Sequence 5′ to 3′ | NO: | Source Name | Name | Antisense Sequence 5′ to 3′ | NO: | Source Name | Name |
| AD-301535.1 | UGCAGGGCAUCAUCAAUUUCU | 491 | NM_000454.4_192- | 192-212 | AGAAAUTGAUGAUGCCCUGCACU | 846 | NM_000454.4_ | 190-212 |
| | | | 212_G21U_s | | | | 190-212_C1A_as | |
| AD-301536.1 | GCAGGGCAUCAUCAAUUUCGA | 492 | NM_000454.4_193- | 193-213 | UCGAAATUGAUGAUGCCCUGCAC | 847 | NM_000454.4_ | 191-213 |
| | | | 213_s | | | | 191-213_as | |
| AD-301537.1 | CAGGGCAUCAUCAAUUUCGAU | 493 | NM_000454.4_194- | 194-214 | AUCGAAAUUGAUGAUGCCCUGCA | 572 | NM_000454.4_ | 192-214 |
| | | | 214_G21U_s | | | | 192-214_C1A_as | |
| AD-301538.1 | AGGGCAUCAUCAAUUUCGAGU | 494 | NM_000454.4_195- | 195-215 | ACUCGAAAUUGAUGAUGCCCUGC | 573 | NM_000454.4_ | 193-215 |
| | | | 215_C21U_s | | | | 193-215_G1A_as | |
| AD-301539.1 | GGGCAUCAUCAAUUUCGAGCA | 495 | NM_000454.4_196- | 196-216 | UGCUCGAAAUUGAUGAUGCCCUG | 574 | NM_000454.4_ | 194-216 |
| | | | 216_s | | | | 194-216_as | |
| AD-301540.1 | GGCAUCAUCAAUUUCGAGCAU | 496 | NM_000454.4_197- | 197-217 | AUGCUCGAAAUUGAUGAUGCCCU | 575 | NM_000454.4_ | 195-217 |
| | | | 217_G21U_s | | | | 195-217_C1A_as | |
| AD-301542.1 | CAUCAUCAAUUUCGAGCAGAA | 497 | NM_000454.4_199- | 199-219 | UUCUGCTCGAAAUUGAUGAUGCC | 848 | NM_000454.4_ | 197-219 |
| | | | 219_s | | | | 197-219_as | |
| AD-301543.1 | AUCAUCAAUUUCGAGCAGAAU | 498 | NM_000454.4_200- | 200-220 | AUUCUGCUCGAAAUUGAUGAUGC | 577 | NM_000454.4_ | 198-220 |
| | | | 220_G21U_s | | | | 198-220_C1A_as | |
| AD-301544.1 | UCAUCAAUUUCGAGCAGAAGU | 499 | NM_000454.4_201- | 201-221 | ACUUCUGCUCGAAAUUGAUGAUG | 578 | NM_000454.4_ | 199-221 |
| | | | 221_G21U_s | | | | 199-221_C1A_as | |
| AD-301549.1 | AAUUUCGAGCAGAAGGAAAGU | 454 | NM_001285406.1_ | 58-78 | ACUUUCCUUCUGCUCGAAAUUGA | 533 | NM_001285406.1 | 56-78 |
| | | | 58-78_s | | | | | |
| AD-301550.1 | AUUUCGAGCAGAAGGAAAGUA | 47 | NM_001285406.1_ | 59-79 | UACUUUCCUUCUGCUCGAAAUUG | 130 | NM_001285406.1 | 57-79 |
| | | | 59-79_s | | | | | |
| AD-301551.1 | UUUCGAGCAGAAGGAAAGUAA | 89 | NM_001285406.1_ | 60-80 | UUACUUTCCUUCUGCUCGAAAUU | 849 | NM_001285406.1 | 58-80 |
| | | | 60-80_s | | | | | |
| AD-301552.1 | UUCGAGCAGAAGGAAAGUAAU | 46 | NM_001285406.1_ | 61-81 | AUUACUTUCCUUCUGCUCGAAAU | 850 | NM_001285406.1 | 59-81 |
| | | | 61-81_s | | | | | |
| AD-301555.1 | GAGCAGAAGGAAAGUAAUGGA | 455 | NM_001285406.1_ | 64-84 | UCCAUUACUUUCCUUCUGCUCGA | 534 | NM_001285406.1 | 62-84 |
| | | | 64-84_s | | | | | |
| AD-301559.1 | AGAAGGAAAGUAAUGGACCAU | 456 | NM_001285406.1_ | 68-88 | AUGGUCCAUUACUUUCCUUCUGC | 535 | NM_001285406.1 | 66-88 |
| | | | 68-88_G21U_s | | | | | |
| AD-301560.1 | GAAGGAAAGUAAUGGACCAGU | 457 | NM_001285406.1_ | 69-89 | ACUGGUCCAUUACUUUCCUUCUG | 536 | NM_001285406.1 | 67-89 |
| | | | 69-89_s | | | | | |
| AD-301562.1 | AGGAAAGUAAUGGACCAGUGA | 458 | NM_001285406.1_ | 71-91 | UCACUGGUCCAUUACUUUCCUUC | 537 | NM_001285406.1 | 69-91 |
| | | | 71-91_s | | | | | |
| AD-301563.1 | GGAAAGUAAUGGACCAGUGAA | 459 | NM_001285406.1_ | 72-92 | UUCACUGGUCCAUUACUUUCCUU | 538 | NM_001285406.1 | 70-92 |
| | | | 72-92_s | | | | | |
| AD-301564.1 | GAAAGUAAUGGACCAGUGAAU | 460 | NM_001285406.1_ | 73-93 | AUUCACTGGUCCAUUACUUUCCU | 851 | NM_001285406.1 | 71-93 |
| | | | 73-93_G21U_s | | | | | |
| AD-301565.1 | AAAGUAAUGGACCAGUGAAGU | 461 | NM_001285406.1_ | 74-94 | ACUUCACUGGUCCAUUACUUUCC | 540 | NM_001285406.1 | 72-94 |
| | | | 74-94_G21U_s | | | | | |
| AD-301566.1 | AAGUAAUGGACCAGUGAAGGU | 462 | NM_001285406.1_ | 75-95 | ACCUUCACUGGUCCAUUACUUUC | 541 | NM_001285406.1 | 73-95 |
| | | | 75-95_s | | | | | |
| AD-301567.1 | AGUAAUGGACCAGUGAAGGUU | 463 | NM_001285406.1_ | 76-96 | AACCUUCACUGGUCCAUUACUUU | 542 | NM_001285406.1 | 74-96 |
| | | | 76-96_G21U_s | | | | | |
| AD-301569.1 | UAAUGGACCAGUGAAGGUGUU | 93 | NM_001285406.1_ | 78-98 | AACACCTUCACUGGUCCAUUACU | 852 | NM_001285406.1 | 76-98 |
| | | | 78-98_G21U_s | | | | | |
| AD-301579.1 | AUUAAAGGACUGACUGAAGGU | 500 | NM_000454.4_ | 254-274 | ACCUUCAGUCAGUCCUUUAAUGC | 579 | NM_000454.4_ | 252-274 |
| | | | 254-274_C21U_s | | | | 252-274_G1A_as | |
| AD-301593.1 | UGAAGGCCUGCAUGGAUUCCA | 464 | NM_001285406.1_ | 120-140 | UGGAAUCCAUGCAGGCCUUCAGU | 543 | NM_001285406.1 | 118-140 |
| | | | 120-140_s | | | | | |
| AD-301594.1 | GAAGGCCUGCAUGGAUUCCAU | 465 | NM_001285406.1_ | 121-141 | AUGGAATCCAUGCAGGCCUUCAG | 853 | NM_001285406.1 | 119-141 |
| | | | 121-141_s | | | | | |
| AD-301596.1 | AGGCCUGCAUGGAUUCCAUGU | 466 | NM_001285406.1_ | 123-143 | ACAUGGAAUCCAUGCAGGCCUUC | 545 | NM_001285406.1 | 121-143 |
| | | | 123-143_s | | | | | |
| AD-301597.1 | GGCCUGCAUGGAUUCCAUGUU | 467 | NM_001285406.1_ | 124-144 | AACAUGGAAUCCAUGCAGGCCUU | 546 | NM_001285406.1 | 122-144 |
| | | | 124-144_s | | | | | |
| AD-301598.1 | GCCUGCAUGGAUUCCAUGUUU | 468 | NM_001285406.1_ | 125-145 | AAACAUGGAAUCCAUGCAGGCCU | 547 | NM_001285406.1 | 123-145 |
| | | | 125-145_C21U_s | | | | | |
| AD-301599.1 | CCUGCAUGGAUUCCAUGUUCA | 469 | NM_001285406.1_ | 126-146 | UGAACATGGAAUCCAUGCAGGCC | 854 | NM_001285406.1 | 124-146 |
| | | | 126-146_s | | | | | |
| AD-301600.1 | CUGCAUGGAUUCCAUGUUCAU | 470 | NM_001285406.1_ | 127-147 | AUGAACAUGGAAUCCAUGCAGGC | 549 | NM_001285406.1 | 125-147 |
| | | | 127-147_s | | | | | |
| AD-301601.1 | UGCAUGGAUUCCAUGUUCAUU | 99 | NM_001285406.1_ | 128-148 | AAUGAACAUGGAAUCCAUGCAGG | 182 | NM_001285406.1 | 126-148 |
| | | | 128-148_C21U_s | | | | | |
| AD-301612.1 | CAUGUUCAUGAGUUUGGAGAU | 501 | NM_000454.4_287- | 287-307 | AUCUCCAAACUCAUGAACAUGGA | 580 | NM_000454.4_ | 285-307 |
| | | | 307_s | | | | 285-307_as | |
| AD-301615.1 | GUUCAUGAGUUUGGAGAUAAU | 502 | NM_000454.4_290- | 290-310 | AUUAUCTCCAAACUCAUGAACAU | 855 | NM_000454.4_ | 288-310 |
| | | | 310_s | | | | 288-310_as | |
| AD-301616.1 | UUCAUGAGUUUGGAGAUAAUA | 503 | NM_000454.4_291- | 291-311 | UAUUAUCUCCAAACUCAUGAACA | 582 | NM_000454.4_ | 289-311 |
| | | | 311_s | | | | 289-311_as | |
| AD-301619.1 | AUGAGUUUGGAGAUAAUACAU | 504 | NM_000454.4_294- | 294-314 | AUGUAUTAUCUCCAAACUCAUGA | 856 | NM_000454.4_ | 292-314 |
| | | | 314_G21U_s | | | | 292-314_C1A_as | |
| AD-301648.1 | ACCAGUGCAGGUCCUCACUUU | 43 | NM_001285406.1_ | 175-195 | AAAGUGAGGACCUGCACUGGUAC | 126 | NM_001285406.1 | 173-195 |
| | | | 175-195_s | | | | | |
| AD-301649.1 | CCAGUGCAGGUCCUCACUUUA | 75 | NM_001285406.1_ | 176-196 | UAAAGUGAGGACCUGCACUGGUA | 158 | NM_001285406.1 | 174-196 |
| | | | 176-196_s | | | | | |
| AD-301650.1 | CAGUGCAGGUCCUCACUUUAA | 54 | NM_001285406.1_ | 177-197 | UUAAAGTGAGGACCUGCACUGGU | 857 | NM_001285406.1 | 175-197 |
| | | | 177-197_s | | | | | |
| AD-301652.1 | GUGCAGGUCCUCACUUUAAUU | 92 | NM_001285406.1_ | 179-199 | AAUUAAAGUGAGGACCUGCACUG | 175 | NM_001285406.1 | 177-199 |
| | | | 179-199_C21U_s | | | | | |
| AD-301653.1 | UGCAGGUCCUCACUUUAAUCU | 39 | NM_001285406.1_ | 180-200 | AGAUUAAAGUGAGGACCUGCACU | 122 | NM_001285406.1 | 178-200 |
| | | | 180-200_C21U_s | | | | | |
| AD-301654.1 | GCAGGUCCUCACUUUAAUCCU | 97 | NM_001285406.1_ | 181-201 | AGGAUUAAAGUGAGGACCUGCAC | 180 | NM_001285406.1 | 179-201 |
| | | | 181-201_s | | | | | |
| AD-301661.1 | CUCACUUUAAUCCUCUAUCCA | 50 | NM_001285406.1_ | 188-208 | UGGAUAGAGGAUUAAAGUGAGGA | 133 | NM_001285406.1 | 186-208 |
| | | | 188-208_s | | | | | |
| AD-301662.1 | UCACUUUAAUCCUCUAUCCAU | 82 | NM_001285406.1_ | 189-209 | AUGGAUAGAGGAUUAAAGUGAGG | 165 | NM_001285406.1 | 187-209 |
| | | | 189-209_G21U_s | | | | | |
| AD-301663.1 | CACUUUAAUCCUCUAUCCAGA | 71 | NM_001285406.1_ | 190-210 | UCUGGATAGAGGAUUAAAGUGAG | 858 | NM_001285406.1 | 188-210 |
| | | | 190-210_s | | | | | |
| AD-301688.1 | ACGGUGGGCCAAAGGAUGAAU | 845 | NM_001285406.1_ | 215-235 | AUUCAUCCUUUGGCCCACCGUGU | 859 | NM_001285406.1 | 213-235 |
| | | | 215-235_G21U_s | | | | | |
| AD-301690.1 | GGUGGGCCAAAGGAUGAAGAU | 471 | NM_001285406.1_ | 217-237 | AUCUUCAUCCUUUGGCCCACCGU | 550 | NM_001285406.1 | 215-237 |
| | | | 217-237_G21U_s | | | | | |
| AD-301697.1 | CAAAGGAUGAAGAGAGGCAUU | 473 | NM_001285406.1_ | 224-244 | AAUGCCTCUCUUCAUCCUUUGGC | 860 | NM_001285406.1 | 222-244 |
| | | | 224-244_G21U_s | | | | | |
| AD-301699.1 | AAGGAUGAAGAGAGGCAUGUU | 474 | NM_001285406.1_ | 226-246 | AACAUGCCUCUCUUCAUCCUUUG | 553 | NM_001285406.1 | 224-246 |
| | | | 226-246_s | | | | | |
| AD-301700.1 | AGGAUGAAGAGAGGCAUGUUU | 475 | NM_001285406.1_ | 227-247 | AAACAUGCCUCUCUUCAUCCUUU | 554 | NM_001285406.1 | 225-247 |
| | | | 227-247_G21U_s | | | | | |
| AD-301701.1 | GGAUGAAGAGAGGCAUGUUGU | 476 | NM_001285406.1_ | 228-248 | ACAACATGCCUCUCUUCAUCCUU | 861 | NM_001285406.1 | 226-248 |
| | | | 228-248_G21U_s | | | | | |
| AD-301702.1 | GAUGAAGAGAGGCAUGUUGGA | 472 | NM_011434.1_345- | 345-365 | UCCAACAUGCCUCUCUUCAUCCU | 551 | NM_000454.4 | 304-326 |
| | | | 365_s | | | | | |
| AD-301703.1 | AUGAAGAGAGGCAUGUUGGAU | 477 | NM_001285406.1_ | 230-250 | AUCCAACAUGCCUCUCUUCAUCC | 556 | NM_001285406.1 | 228-250 |
| | | | 230-250_G21U_s | | | | | |
| AD-301706.1 | AAGAGAGGCAUGUUGGAGACU | 478 | NM_001285406.1_ | 233-253 | AGUCUCCAACAUGCCUCUCUUCA | 557 | NM_001285406.1 | 231-253 |
| | | | 233-253_C21U_s | | | | | |
| AD-301764.1 | UGUGUCUAUUGAAGAUUCUGU | 505 | NM_000454.4_439- | 439-459 | ACAGAATCUUCAAUAGACACAUC | 862 | NM_000454.4_ | 437-459 |
| | | | 459_s | | | | 437-459_as | |
| AD-301765.1 | GUGUCUAUUGAAGAUUCUGUU | 506 | NM_000454.4_440- | 440-460 | AACAGAAUCUUCAAUAGACACAU | 585 | NM_000454.4_ | 438-460 |
| | | | 460_G21U_s | | | | 438-460_C1A_as | |
| AD-301799.1 | GAGACCAUUGCAUCAUUGGCU | 509 | NM_000454.4_474- | 474-494 | AGCCAATGAUGCAAUGGUCUCCU | 863 | NM_000454.4_ | 472-494 |
| | | | 494_C21U_s | | | | 472-494_G1A_as | |
| AD-301824.1 | ACUGGUGGUCCAUGAAAAAGU | 510 | NM_000454.4_499- | 499-519 | ACUUUUTCAUGGACCACCAGUGU | 864 | NM_000454.4_ | 497-519 |
| | | | 519_C21U_s | | | | 497-519_G1A_as | |
| AD-301825.1 | CUGGUGGUCCAUGAAAAAGCA | 511 | NM_000454.4_500- | 500-520 | UGCUUUTUCAUGGACCACCAGUG | 865 | NM_000454.4_ | 498-520 |
| | | | 520_s | | | | 498-520_as | |
| AD-301826.1 | UGGUGGUCCAUGAAAAAGCAU | 507 | NM_001285406.1_ | 353-373 | AUGCUUTUUCAUGGACCACCAGU | 866 | NM_000454.4_ | 351-373 |
| | | | 353-373_G21U_s | | | | 499-521_C1A_as | |
| AD-301827.1 | GGUGGUCCAUGAAAAAGCAGA | 508 | NM_001285406.1_ | 354-374 | UCUGCUTUUUCAUGGACCACCAG | 867 | NM_000454.4_ | 352-374 |
| | | | 354-374_s | | | | 500-522_as | |
| AD-301828.1 | GUGGUCCAUGAAAAAGCAGAU | 480 | NM_001285406.1_ | 355-375 | AUCUGCTUUUUCAUGGACCACCA | 868 | NM_001285406.1 | 353-375 |
| | | | 355-375_s | | | | | |
| AD-301829.1 | UGGUCCAUGAAAAAGCAGAUU | 481 | NM_001285406.1_ | 356-376 | AAUCUGCUUUUUCAUGGACCACC | 560 | NM_001285406.1 | 354-376 |
| | | | 356-376_G21U_s | | | | | |
| AD-301830.1 | GGUCCAUGAAAAAGCAGAUGA | 482 | NM_001285406.1_ | 357-377 | UCAUCUGCUUUUUCAUGGACCAC | 561 | NM_001285406.1 | 355-377 |
| | | | 357-377_s | | | | | |
| AD-301843.1 | GCAGAUGACUUGGGCAAAGGU | 483 | NM_001285406.1_ | 370-390 | ACCUUUGCCCAAGUCAUCUGCUU | 562 | NM_001285406.1 | 368-390 |
| | | | 370-390_s | | | | | |
| AD-301845.1 | AGAUGACUUGGGCAAAGGUGU | 484 | NM_001285406.1_ | 372-392 | ACACCUTUGCCCAAGUCAUCUGC | 869 | NM_001285406.1 | 370-392 |
| | | | 372-392_G21U_s | | | | | |
| AD-301846.1 | GAUGACUUGGGCAAAGGUGGA | 479 | NM_011434.1_489- | 489-509 | UCCACCTUUGCCCAAGUCAUCUG | 870 | NM_011434.1 | 486-509 |
| | | | 509_s | | | | | |
| AD-301847.1 | AUGACUUGGGCAAAGGUGGAA | 450 | NM_011434.1_490- | 490-510 | UUCCACCUUUGCCCAAGUCAUCU | 529 | NM_011434.1 | 488-510 |
| | | | 510_s | | | | | |
| AD-301848.1 | UGACUUGGGCAAAGGUGGAAA | 451 | NM_011434.1_491- | 491-511 | UUUCCACCUUUGCCCAAGUCAUC | 530 | NM_011434.1 | 489-511 |
| | | | 511_s | | | | | |
| AD-301849.1 | GACUUGGGCAAAGGUGGAAAU | 452 | NM_011434.1_492- | 492-512 | AUUUCCACCUUUGCCCAAGUCAU | 531 | NM_011434.1 | 490-512 |
| | | | 512_s | | | | | |
| AD-301850.1 | ACUUGGGCAAAGGUGGAAAUU | 485 | NM_001285406.1_ | 377-397 | AAUUUCCACCUUUGCCCAAGUCA | 564 | NM_001285406.1 | 375-397 |
| | | | 377-397_G21U_s | | | | | |
| AD-301852.1 | UUGGGCAAAGGUGGAAAUGAA | 103 | NM_011434.1_495- | 495-515 | UUCAUUTCCACCUUUGCCCAAGU | 871 | NM_011434.1 | 493-515 |
| | | | 515_s | | | | | |
| AD-301859.1 | AAGGUGGAAAUGAAGAAAGUA | 453 | NM_011434.1_502- | 502-522 | UACUUUCUUCAUUUCCACCUUUG | 532 | NM_011434.1 | 500-522 |
| | | | 522_s | | | | | |
| AD-301860.1 | AGGUGGAAAUGAAGAAAGUAU | 512 | NM_000454.4_535- | 535-555 | AUACUUTCUUCAUUUCCACCUUU | 872 | NM_000454.4_ | 533-555 |
| | | | 555_C21U_s | | | | 533-555_G1A_as | |
| AD-301873.1 | GAAAGUACAAAGACAGGAAAU | 513 | NM_000454.4_548- | 548-568 | AUUUCCTGUCUUUGUACUUUCUU | 873 | NM_000454.4_ | 546-568 |
| | | | 568_C21U_s | | | | 546-568_G1A_as | |
| AD-301874.1 | AAAGUACAAAGACAGGAAACU | 514 | NM_000454.4_549- | 549-569 | AGUUUCCUGUCUUUGUACUUUCU | 593 | NM_000454.4_ | 547-569 |
| | | | 569_G21U_s | | | | 547-569_C1A_as | |
| AD-301875.1 | AAGUACAAAGACAGGAAACGU | 515 | NM_000454.4_550- | 550-570 | ACGUUUCCUGUCUUUGUACUUUC | 594 | NM_000454.4_ | 548-570 |
| | | | 570_C21U_s | | | | 548-570_G1A_as | |
| AD-301876.1 | AGUACAAAGACAGGAAACGCU | 516 | NM_000454.4_551- | 551-571 | AGCGUUTCCUGUCUUUGUACUUU | 874 | NM_000454.4_ | 549-571 |
| | | | 571_s | | | | 549-571_as | |
| AD-301877.1 | GUACAAAGACAGGAAACGCUU | 517 | NM_000454.4_552- | 552-572 | AAGCGUTUCCUGUCUUUGUACUU | 875 | NM_000454.4_ | 550-572 |
| | | | 572_G21U_s | | | | 550-572_C1A_as | |
| AD-301878.1 | UACAAAGACAGGAAACGCUGU | 518 | NM_000454.4_553- | 553-573 | ACAGCGTUUCCUGUCUUUGUACU | 876 | NM_000454.4_ | 551-573 |
| | | | 573_G21U_s | | | | 551-573_C1A_as | |
| AD-301880.1 | CAAAGACAGGAAACGCUGGAA | 519 | NM_000454.4_555- | 555-575 | UUCCAGCGUUUCCUGUCUUUGUA | 598 | NM_000454.4_ | 553-575 |
| | | | 575_s | | | | 553-575_as | |
| AD-301901.1 | GUCGUUUGGCUUGUGGUGUAA | 522 | NM_000454.4_576- | 576-596 | UUACACCACAAGCCAAACGACUU | 601 | NM_000454.4_ | 574-596 |
| | | | 596_s | | | | 574-596_as | |
| AD-301902.1 | UCGUUUGGCUUGUGGUGUAAU | 523 | NM_000454.4_577- | 577-597 | AUUACACCACAAGCCAAACGACU | 602 | NM_000454.4_ | 575-597 |
| | | | 597_s | | | | 575-597_as | |
| AD-301903.1 | CGUUUGGCUUGUGGUGUAAUU | 524 | NM_000454.4_578- | 578-598 | AAUUACACCACAAGCCAAACGAC | 603 | NM_000454.4_ | 576-598 |
| | | | 598_s | | | | 576-598_as | |
| AD-301904.1 | GUUUGGCUUGUGGUGUAAUUU | 525 | NM_000454.4_579- | 579-599 | AAAUUACACCACAAGCCAAACGA | 604 | NM_000454.4_ | 577-599 |
| | | | 599_G21U_s | | | | 577-599_C1A_as | |
| AD-301905.1 | UUUGGCUUGUGGUGUAAUUGU | 526 | NM_000454.4_580- | 580-600 | ACAAUUACACCACAAGCCAAACG | 605 | NM_000454.4_ | 578-600 |
| | | | 600_G21U_s | | | | 578-600_C1A_as | |
| AD-301906.1 | UUGGCUUGUGGUGUAAUUGGU | 527 | NM_000454.4_581- | 581-601 | ACCAAUTACACCACAAGCCAAAC | 877 | NM_000454.4_ | 579-601 |
| | | | 601_G21U_s | | | | 579-601_C1A_as | |
| AD-301907.1 | UGGCUUGUGGUGUAAUUGGGA | 520 | NM_001285406.1_ | 434-454 | UCCCAATUACACCACAAGCCAAA | 878 | NM_001285406.1 | 432-454 |
| | | | 434-454_s | | | | | |
| AD-301908.1 | GGCUUGUGGUGUAAUUGGGAU | 521 | NM_001285406.1_ | 435-455 | AUCCCAAUUACACCACAAGCCAA | 600 | NM_001285406.1 | 433-455 |
| | | | 435-455_s | | | | | |
| AD-301909.1 | GCUUGUGGUGUAAUUGGGAUU | 486 | NM_001285406.1_ | 436-456 | AAUCCCAAUUACACCACAAGCCA | 565 | NM_001285406.1 | 434-456 |
| | | | 436-456_C21U_s | | | | | |
| AD-301910.1 | CUUGUGGUGUAAUUGGGAUCU | 487 | NM_001285406.1_ | 437-457 | AGAUCCCAAUUACACCACAAGCC | 566 | NM_001285406.1 | 435-457 |
| | | | 437-457_G21U_s | | | | | |
| AD-301911.1 | UUGUGGUGUAAUUGGGAUCGU | 488 | NM_001285406.1_ | 438-458 | ACGAUCCCAAUUACACCACAAGC | 567 | NM_001285406.1 | 436-458 |
| | | | 438-458_C21U_s | | | | | |
| AD-301912.1 | UGUGGUGUAAUUGGGAUCGCU | 489 | NM_001285406.1_ | 439-459 | AGCGAUCCCAAUUACACCACAAG | 568 | NM_001285406.1 | 437-459 |
| | | | 439-459_C21U_s | | | | | |
| AD-301918.1 | GUAAUUGGGAUCGCCCAAUAA | 528 | NM_000454.4_593- | 593-613 | UUAUUGGGCGAUCCCAAUUACAC | 607 | NM_000454.4_59 | 591-613 |
| | | | 613_s | | | | 1-613_as | |

TABLE 7
Modified Sense and Antisense Strand Sequences of Superoxide Dismutase 1 dsRNA Agents

| | | SEQ ID | | SEQ ID | | SEQ ID |
|---|---|---|---|---|---|---|
| Duplex Name | Sense Sequence 5′ to 3′ | NO: | Antisense Sequence 5′ to 3′ | NO: | mRNA target sequence | NO: |
| AD-301535.1 | usgscaggGfcAfUfCfaucaauuucuL96 | 649 | asGfsaaau(Tgn)gaugauGfcCfcugcascsu | 880 | AGUGCAGGGCAUCAUCAAUUUCG | 807 |
| AD-301536.1 | gscsagggCfaUfCfAfucaauuucgaL96 | 650 | usCfsgaaa(Tgn)ugaugaUfgCfccugcsasc | 881 | GUGCAGGGCAUCAUCAAUUUCGA | 808 |
| AD-301537.1 | csasgggcAfuCfAfUfcaauuucgauL96 | 651 | asUfscgaa(Agn)uugaugAfuGfcccugscsa | 882 | UGCAGGGCAUCAUCAAUUUCGAG | 809 |
| AD-301538.1 | asgsggcaUfcAfUfCfaauuucgaguL96 | 652 | asCfsucga(Agn)auugauGfaUfgcccusgsc | 883 | GCAGGGCAUCAUCAAUUUCGAGC | 810 |
| AD-301539.1 | gsgsgcauCfaUfCfAfauuucgagcaL96 | 653 | usGfscucg(Agn)aauugaUfgAfugcccsusg | 884 | CAGGGCAUCAUCAAUUUCGAGCA | 811 |
| AD-301540.1 | gsgscaucAfuCfAfAfuuucgagcauL96 | 654 | asUfsgcuc(Ggn)aaauugAfuGfaugccscsu | 885 | AGGGCAUCAUCAAUUUCGAGCAG | 812 |
| AD-301542.1 | csasucauCfaAfUfUfucgagcagaaL96 | 655 | usUfscugc(Tgn)cgaaauUfgAfugaugscsc | 886 | GGCAUCAUCAAUUUCGAGCAGAA | 813 |
| AD-301543.1 | asuscaucAfaUfUfUfcgagcagaauL96 | 656 | asUfsucug(Cgn)ucgaaaUfuGfaugausgsc | 887 | GCAUCAUCAAUUUCGAGCAGAAG | 814 |
| AD-301544.1 | uscsaucaAfuUfUfCfgagcagaaguL96 | 657 | asCfsuucu(Ggn)cucgaaAfuUfgaugasusg | 888 | CAUCAUCAAUUUCGAGCAGAAGG | 815 |
| AD-301549.1 | asasuuucGfaGfCfAfgaaggaaaguL96 | 612 | asCfsuuuc(Cgn)uucugcUfcGfaaauusgsa | 889 | UCAAUUUCGAGCAGAAGGAAAGU | 770 |
| AD-301550.1 | asusuucgAfgCfAfGfaaggaaaguaL96 | 213 | usAfscuuu(Cgn)cuucugCfuCfgaaaususg | 890 | CAAUUUCGAGCAGAAGGAAAGUA | 379 |
| AD-301551.1 | ususucgaGfcAfGfAfaggaaaguaaL96 | 255 | usUfsacuu(Tgn)ccuucuGfcUfcgaaasusu | 891 | AAUUUCGAGCAGAAGGAAAGUAA | 421 |
| AD-301552.1 | ususcgagCfaGfAfAfggaaaguaauL96 | 212 | asUfsuacu(Tgn)uccuucUfgCfucgaasasu | 892 | AUUUCGAGCAGAAGGAAAGUAAU | 378 |
| AD-301555.1 | gsasgcagAfaGfGfAfaaguaauggaL96 | 613 | usCfscauu(Agn)cuuuccUfuCfugcucsgsa | 893 | UCGAGCAGAAGGAAAGUAAUGGA | 771 |
| AD-301559.1 | asgsaaggAfaAfGfUfaauggaccauL96 | 614 | asUfsgguc(Cgn)auuacuUfuCfcuucusgsc | 894 | GCAGAAGGAAAGUAAUGGACCAG | 772 |
| AD-301560.1 | gsasaggaAfaGfUfAfauggaccaguL96 | 615 | asCfsuggu(Cgn)cauuacUfuUfccuucsusg | 895 | CAGAAGGAAAGUAAUGGACCAGU | 773 |
| AD-301562.1 | asgsgaaaGfuAfAfUfggaccagugaL96 | 616 | usCfsacug(Ggn)uccauuAfcUfuuccususc | 896 | GAAGGAAAGUAAUGGACCAGUGA | 774 |
| AD-301563.1 | gsgsaaagUfaAfUfGfgaccagugaaL96 | 617 | usUfscacu(Ggn)guccauUfaCfuuuccsusu | 897 | AAGGAAAGUAAUGGACCAGUGAA | 775 |
| AD-301564.1 | gsasaaguAfaUfGfGfaccagugaauL96 | 618 | asUfsucac(Tgn)gguccaUfuAfcuuucscsu | 898 | AGGAAAGUAAUGGACCAGUGAAG | 776 |
| AD-301565.1 | asasaguaAfuGfGfAfccagugaaguL96 | 619 | asCfsuuca(Cgn)ugguccAfuUfacuuuscsc | 899 | GGAAAGUAAUGGACCAGUGAAGG | 777 |
| AD-301566.1 | asasguaaUfgGfAfCfcagugaagguL96 | 620 | asCfscuuc(Agn)cuggucCfaUfuacuususc | 900 | GAAAGUAAUGGACCAGUGAAGGU | 778 |
| AD-301567.1 | asgsuaauGfgAfCfCfagugaagguuL96 | 621 | asAfsccuu(Cgn)acugguCfcAfuuacususu | 901 | AAAGUAAUGGACCAGUGAAGGUG | 779 |
| AD-301569.1 | usasauggAfcCfAfGfugaagguguuL96 | 259 | asAfscacc(Tgn)ucacugGfuCfcauuascsu | 902 | AGUAAUGGACCAGUGAAGGUGUG | 425 |
| AD-301579.1 | asusuaaaGfgAfCfUfgacugaagguL96 | 658 | asCfscuuc(Agn)gucaguCfcUfuuaausgsc | 903 | GCAUUAAAGGACUGACUGAAGGC | 816 |
| AD-301593.1 | usgsaaggCfcUfGfCfauggauuccaL96 | 622 | usGfsgaau(Cgn)caugcaGfgCfcuucasgsu | 904 | ACUGAAGGCCUGCAUGGAUUCCA | 780 |
| AD-301594.1 | gsasaggcCfuGfCfAfuggauuccauL96 | 623 | asUfsggaa(Tgn)ccaugcAfgGfccuucsasg | 905 | CUGAAGGCCUGCAUGGAUUCCAU | 781 |
| AD-301596.1 | asgsgccuGfcAfUfGfgauuccauguL96 | 624 | asCfsaugg(Agn)auccauGfcAfggccususc | 906 | GAAGGCCUGCAUGGAUUCCAUGU | 782 |
| AD-301597.1 | gsgsccugCfaUfGfGfauuccauguuL96 | 625 | asAfscaug(Ggn)aauccaUfgCfaggccsusu | 907 | AAGGCCUGCAUGGAUUCCAUGUU | 783 |
| AD-301598.1 | gscscugcAfuGfGfAfuuccauguuuL96 | 626 | asAfsacau(Ggn)gaauccAfuGfcaggcscsu | 908 | AGGCCUGCAUGGAUUCCAUGUUC | 784 |
| AD-301599.1 | cscsugcaUfgGfAfUfuccauguucaL96 | 627 | usGfsaaca(Tgn)ggaaucCfaUfgcaggscsc | 909 | GGCCUGCAUGGAUUCCAUGUUCA | 785 |
| AD-301600.1 | csusgcauGfgAfUfUfccauguucauL96 | 628 | asUfsgaac(Agn)uggaauCfcAfugcagsgsc | 910 | GCCUGCAUGGAUUCCAUGUUCAU | 786 |
| AD-301601.1 | usgscaugGfaUfUfCfcauguucauuL96 | 265 | asAfsugaa(Cgn)auggaaUfcCfaugcasgsg | 911 | CCUGCAUGGAUUCCAUGUUCAUC | 431 |
| AD-301612.1 | csasuguuCfaUfGfAfguuuggagauL96 | 659 | asUfscucc(Agn)aacucaUfgAfacaugsgsa | 912 | UCCAUGUUCAUGAGUUUGGAGAU | 817 |
| AD-301615.1 | gsusucauGfaGfUfUfuggagauaauL96 | 660 | asUfsuauc(Tgn)ccaaacUfcAfugaacsasu | 913 | AUGUUCAUGAGUUUGGAGAUAAU | 818 |
| AD-301616.1 | ususcaugAfgUfUfUfggagauaauaL96 | 661 | usAfsuuau(Cgn)uccaaaCfuCfaugaascsa | 914 | UGUUCAUGAGUUUGGAGAUAAUA | 819 |
| AD-301619.1 | asusgaguUfuGfGfAfgauaauacauL96 | 662 | asUfsguau(Tgn)aucuccAfaAfcucausgsa | 915 | UCAUGAGUUUGGAGAUAAUACAG | 820 |
| AD-301648.1 | ascscaguGfcAfGfGfuccucacuuuL96 | 209 | asAfsagug(Agn)ggaccuGfcAfcuggusasc | 916 | GUACCAGUGCAGGUCCUCACUUU | 375 |
| AD-301649.1 | cscsagugCfaGfGfUfccucacuuuaL96 | 241 | usAfsaagu(Ggn)aggaccUfgCfacuggsusa | 917 | UACCAGUGCAGGUCCUCACUUUA | 407 |
| AD-301650.1 | csasgugcAfgGfUfCfcucacuuuaaL96 | 220 | usUfsaaag(Tgn)gaggacCfuGfcacugsgsu | 918 | ACCAGUGCAGGUCCUCACUUUAA | 386 |
| AD-301652.1 | gsusgcagGfuCfCfUfcacuuuaauuL96 | 258 | asAfsuuaa(Agn)gugaggAfcCfugcacsusg | 919 | CAGUGCAGGUCCUCACUUUAAUC | 424 |
| AD-301653.1 | usgscaggUfcCfUfCfacuuuaaucuL96 | 205 | asGfsauua(Agn)agugagGfaCfcugcascsu | 920 | AGUGCAGGUCCUCACUUUAAUCC | 371 |
| AD-301654.1 | gscsagguCfcUfCfAfcuuuaauccuL96 | 263 | asGfsgauu(Agn)aagugaGfgAfccugcsasc | 921 | GUGCAGGUCCUCACUUUAAUCCU | 429 |
| AD-301661.1 | csuscacuUfuAfAfUfccucuauccaL96 | 216 | usGfsgaua(Ggn)aggauuAfaAfgugagsgsa | 922 | UCCUCACUUUAAUCCUCUAUCCA | 382 |
| AD-301662.1 | uscsacuuUfaAfUfCfcucuauccauL96 | 248 | asUfsggau(Agn)gaggauUfaAfagugasgsg | 923 | CCUCACUUUAAUCCUCUAUCCAG | 414 |
| AD-301663.1 | csascuuuAfaUfCfCfucuauccagaL96 | 237 | usCfsugga(Tgn)agaggaUfuAfaagugsasg | 924 | CUCACUUUAAUCCUCUAUCCAGA | 403 |
| AD-301688.1 | ascsggugGfgCfCfAfaaggaugaauL96 | 879 | asUfsucau(Cgn)cuuuggCfcCfaccgusgsu | 925 | ACACGGUGGGCCAAAGGAUGAAG | 974 |
| AD-301690.1 | gsgsugggCfcAfAfAfggaugaagauL96 | 629 | asUfscuuc(Agn)uccuuuGfgCfccaccsgsu | 926 | ACGGUGGGCCAAAGGAUGAAGAG | 787 |
| AD-301697.1 | csasaaggAfuGfAfAfgagaggcauuL96 | 631 | asAfsugcc(Tgn)cucuucAfuCfcuuugsgsc | 927 | GCCAAAGGAUGAAGAGAGGCAUG | 789 |
| AD-301699.1 | asasggauGfaAfGfAfgaggcauguuL96 | 632 | asAfscaug(Cgn)cucucuUfcAfuccuususg | 928 | CAAAGGAUGAAGAGAGGCAUGUU | 790 |
| AD-301700.1 | asgsgaugAfaGfAfGfaggcauguuuL96 | 633 | asAfsacau(Ggn)ccucucUfuCfauccususu | 929 | AAAGGAUGAAGAGAGGCAUGUUG | 791 |
| AD-301701.1 | gsgsaugaAfgAfGfAfggcauguuguL96 | 634 | asCfsaaca(Tgn)gccucuCfuUfcauccsusu | 930 | AAGGAUGAAGAGAGGCAUGUUGG | 792 |
| AD-301702.1 | gsasugaaGfaGfAfGfgcauguuggaL96 | 630 | usCfscaac(Agn)ugccucUfcUfucaucscsu | 931 | AGGAUGAAGAGAGGCAUGUUGGA | 788 |
| AD-301703.1 | asusgaagAfgAfGfGfcauguuggauL96 | 635 | asUfsccaa(Cgn)augccuCfuCfuucauscsc | 932 | GGAUGAAGAGAGGCAUGUUGGAG | 793 |
| AD-301706.1 | asasgagaGfgCfAfUfguuggagacuL96 | 636 | asGfsucuc(Cgn)aacaugCfcUfcucuuscsa | 933 | UGAAGAGAGGCAUGUUGGAGACC | 794 |
| AD-301764.1 | usgsugucUfaUfUfGfaagauucuguL96 | 663 | asCfsagaa(Tgn)cuucaaUfaGfacacasusc | 934 | GAUGUGUCUAUUGAAGAUUCUGU | 821 |
| AD-301765.1 | gsusgucuAfuUfGfAfagauucuguuL96 | 664 | asAfscaga(Agn)ucuucaAfuAfgacacsasu | 935 | AUGUGUCUAUUGAAGAUUCUGUG | 822 |
| AD-301799.1 | gsasgaccAfuUfGfCfaucauuggcuL96 | 667 | asGfsccaa(Tgn)gaugcaAfuGfgucucscsu | 936 | AGGAGACCAUUGCAUCAUUGGCC | 825 |
| AD-301824.1 | ascsugguGfgUfCfCfaugaaaaaguL96 | 668 | asCfsuuuu(Tgn)cauggaCfcAfccagusgsu | 937 | ACACUGGUGGUCCAUGAAAAAGC | 826 |
| AD-301825.1 | csusggugGfuCfCfAfugaaaaagcaL96 | 669 | usGfscuuu(Tgn)ucauggAfcCfaccagsusg | 938 | CACUGGUGGUCCAUGAAAAAGCA | 827 |
| AD-301826.1 | usgsguggUfcCfAfUfgaaaaagcauL96 | 665 | asUfsgcuu(Tgn)uucaugGfaCfcaccasgsu | 939 | ACUGGUGGUCCAUGAAAAAGCAU | 823 |
| AD-301827.1 | gsgsugguCfcAfUfGfaaaaagcagaL96 | 666 | usCfsugcu(Tgn)uuucauGfgAfccaccsasg | 940 | CUGGUGGUCCAUGAAAAAGCAGA | 824 |
| AD-301828.1 | gsusggucCfaUfGfAfaaaagcagauL96 | 638 | asUfscugc(Tgn)uuuucaUfgGfaccacscsa | 941 | UGGUGGUCCAUGAAAAAGCAGAU | 796 |
| AD-301829.1 | usgsguccAfuGfAfAfaaagcagauuL96 | 639 | asAfsucug(Cgn)uuuuucAfuGfgaccascsc | 942 | GGUGGUCCAUGAAAAAGCAGAUG | 797 |
| AD-301830.1 | gsgsuccaUfgAfAfAfaagcagaugaL96 | 640 | usCfsaucu(Ggn)cuuuuuCfaUfggaccsasc | 943 | GUGGUCCAUGAAAAAGCAGAUGA | 798 |
| AD-301843.1 | gscsagauGfaCfUfUfgggcaaagguL96 | 641 | asCfscuuu(Ggn)cccaagUfcAfucugcsusu | 944 | AAGCAGAUGACUUGGGCAAAGGU | 799 |
| AD-301845.1 | asgsaugaCfuUfGfGfgcaaagguguL96 | 642 | asCfsaccu(Tgn)ugcccaAfgUfcaucusgsc | 945 | GCAGAUGACUUGGGCAAAGGUGG | 800 |
| AD-301846.1 | gsasugacUfuGfGfGfcaaagguggaL96 | 637 | usCfscacc(Tgn)uugcccAfaGfucaucsusg | 946 | CAGAUGACUUGGGCAAAGGUGGA | 795 |
| AD-301847.1 | asusgacuUfgGfGfCfaaagguggaaL96 | 608 | usUfsccac(Cgn)uuugccCfaAfgucauscsu | 947 | AGAUGACUUGGGCAAAGGUGGAA | 766 |
| AD-301848.1 | usgsacuuGfgGfCfAfaagguggaaaL96 | 609 | usUfsucca(Cgn)cuuugcCfcAfagucasusc | 948 | GAUGACUUGGGCAAAGGUGGAAA | 767 |
| AD-301849.1 | gsascuugGfgCfAfAfagguggaaauL96 | 610 | asUfsuucc(Agn)ccuuugCfcCfaagucsasu | 949 | AUGACUUGGGCAAAGGUGGAAAU | 768 |
| AD-301850.1 | ascsuuggGfcAfAfAfgguggaaauuL96 | 643 | asAfsuuuc(Cgn)accuuuGfcCfcaaguscsa | 950 | UGACUUGGGCAAAGGUGGAAAUG | 801 |
| AD-301852.1 | ususgggcAfaAfGfGfuggaaaugaaL96 | 269 | usUfscauu(Tgn)ccaccuUfuGfcccaasgsu | 951 | ACUUGGGCAAAGGUGGAAAUGAA | 435 |
| AD-301859.1 | asasggugGfaAfAfUfgaagaaaguaL96 | 611 | usAfscuuu(Cgn)uucauuUfcCfaccuususg | 952 | CAAAGGUGGAAAUGAAGAAAGUA | 769 |
| AD-301860.1 | asgsguggAfaAfUfGfaagaaaguauL96 | 670 | asUfsacuu(Tgn)cuucauUfuCfcaccususu | 953 | AAAGGUGGAAAUGAAGAAAGUAC | 828 |
| AD-301873.1 | gsasaaguAfcAfAfAfgacaggaaauL96 | 671 | asUfsuucc(Tgn)gucuuuGfuAfcuuucsusu | 954 | AAGAAAGUACAAAGACAGGAAAC | 829 |
| AD-301874.1 | asasaguaCfaAfAfGfacaggaaacuL96 | 672 | asGfsuuuc(Cgn)ugucuuUfgUfacuuuscsu | 955 | AGAAAGUACAAAGACAGGAAACG | 830 |
| AD-301875.1 | asasguacAfaAfGfAfcaggaaacguL96 | 673 | asCfsguuu(Cgn)cugucuUfuGfuacuususc | 956 | GAAAGUACAAAGACAGGAAACGC | 831 |
| AD-301876.1 | asgsuacaAfaGfAfCfaggaaacgcuL96 | 674 | asGfscguu(Tgn)ccugucUfuUfguacususu | 957 | AAAGUACAAAGACAGGAAACGCU | 832 |
| AD-301877.1 | gsusacaaAfgAfCfAfggaaacgcuuL96 | 675 | asAfsgcgu(Tgn)uccuguCfuUfuguacsusu | 958 | AAGUACAAAGACAGGAAACGCUG | 833 |
| AD-301878.1 | usascaaaGfaCfAfGfgaaacgcuguL96 | 676 | asCfsagcg(Tgn)uuccugUfcUfuuguascsu | 959 | AGUACAAAGACAGGAAACGCUGG | 834 |
| AD-301880.1 | csasaagaCfaGfGfAfaacgcuggaaL96 | 677 | usUfsccag(Cgn)guuuccUfgUfcuuugsusa | 960 | UACAAAGACAGGAAACGCUGGAA | 835 |
| AD-301901.1 | gsuscguuUfgGfCfUfugugguguaaL96 | 680 | usUfsacac(Cgn)acaagcCfaAfacgacsusu | 961 | AAGUCGUUUGGCUUGUGGUGUAA | 838 |
| AD-301902.1 | uscsguuuGfgCfUfUfgugguguaauL96 | 681 | asUfsuaca(Cgn)cacaagCfcAfaacgascsu | 962 | AGUCGUUUGGCUUGUGGUGUAAU | 839 |
| AD-301903.1 | csgsuuugGfcUfUfGfugguguaauuL96 | 682 | asAfsuuac(Agn)ccacaaGfcCfaaacgsasc | 963 | GUCGUUUGGCUUGUGGUGUAAUU | 840 |
| AD-301904.1 | gsusuuggCfuUfGfUfgguguaauuuL96 | 683 | asAfsauua(Cgn)accacaAfgCfcaaacsgsa | 964 | UCGUUUGGCUUGUGGUGUAAUUG | 841 |
| AD-301905.1 | ususuggcUfuGfUfGfguguaauuguL96 | 684 | asCfsaauu(Agn)caccacAfaGfccaaascsg | 965 | CGUUUGGCUUGUGGUGUAAUUGG | 842 |
| AD-301906.1 | ususggcuUfgUfGfGfuguaauugguL96 | 685 | asCfscaau(Tgn)acaccaCfaAfgccaasasc | 966 | GUUUGGCUUGUGGUGUAAUUGGG | 843 |
| AD-301907.1 | usgsgcuuGfuGfGfUfguaauugggaL96 | 678 | usCfsccaa(Tgn)uacaccAfcAfagccasasa | 967 | UUUGGCUUGUGGUGUAAUUGGGA | 836 |
| AD-301908.1 | gsgscuugUfgGfUfGfuaauugggauL96 | 679 | asUfsccca(Agn)uuacacCfaCfaagccsasa | 968 | UUGGCUUGUGGUGUAAUUGGGAU | 837 |
| AD-301909.1 | gscsuuguGfgUfGfUfaauugggauuL96 | 644 | asAfsuccc(Agn)auuacaCfcAfcaagescsa | 969 | UGGCUUGUGGUGUAAUUGGGAUC | 802 |
| AD-301910.1 | csusugugGfuGfUfAfauugggaucuL96 | 645 | asGfsaucc(Cgn)aauuacAfcCfacaagscsc | 970 | GGCUUGUGGUGUAAUUGGGAUCG | 803 |
| AD-301911.1 | ususguggUfgUfAfAfuugggaucguL96 | 646 | asCfsgauc(Cgn)caauuaCfaCfcacaasgsc | 971 | GCUUGUGGUGUAAUUGGGAUCGC | 804 |
| AD-301912.1 | usgsugguGfuAfAfUfugggaucgcuL96 | 647 | asGfscgau(Cgn)ccaauuAfcAfccacasasg | 972 | CUUGUGGUGUAAUUGGGAUCGCC | 805 |
| AD-301918.1 | gsusaauuGfgGfAfUfcgcccaauaaL96 | 686 | usUfsauug(Ggn)gcgaucCfcAfauuacsasc | 973 | GUGUAAUUGGGAUCGCCCAAUAA | 844 |

TABLE 8
Superoxide Dismutase 1 In Vitro Single Dose Screens
in Primary Cynomolgus Hepatocytes (PCH) cells

| | |
|---|---|
| Dose - Unit | Dose - Unit |
| 10 - nM | 0.1 - nM |

| Duplex | Avg | SD | Avg | SD |
|---|---|---|---|---|
| AD-266859.1 | 1.6 | 0.3 | 23.5 | 4.1 |
| AD-266997.1 | 1.2 | 0.4 | 15.3 | 4.3 |
| AD-266992.1 | 0.8 | 0.1 | 11.4 | 1.5 |
| AD-266903.1 | 6.5 | 0.8 | 81.9 | 8.0 |
| AD-266891.1 | 7.4 | 1.7 | 81.4 | 9.4 |
| AD-266996.1 | 10.8 | 7.1 | 78.4 | 6.0 |
| AD-266893.1 | 1.7 | 1.0 | 29.0 | 5.0 |
| AD-266898.1 | 3.5 | 2.1 | 60.5 | 7.6 |
| AD-266886.1 | 4.2 | 0.9 | 77.1 | 23.0 |
| AD-267072.1 | 7.9 | 2.0 | 104.4 | 22.5 |
| AD-267067.1 | 25.1 | 2.0 | 110.8 | 14.4 |
| AD-266791.1 | 1.3 | 0.3 | 11.8 | 2.0 |
| AD-266789.1 | 11.4 | 1.7 | 85.0 | 5.2 |
| AD-266861.1 | 1.9 | 0.3 | 33.6 | 1.9 |
| AD-266856.1 | 2.3 | 0.4 | 27.0 | 1.4 |
| AD-266899.1 | 7.8 | 0.9 | 65.6 | 4.9 |
| AD-267000.1 | 1.3 | 0.2 | 18.9 | 2.3 |
| AD-267071.1 | 1.9 | 0.5 | 26.1 | 4.9 |
| AD-266895.1 | 6.6 | 0.4 | 58.3 | 4.2 |
| AD-266888.1 | 3.8 | 0.7 | 51.4 | 16.5 |
| AD-266817.1 | 7.7 | 1.8 | 102.7 | 26.6 |
| AD-267083.1 | 5.1 | 2.0 | 77.8 | 17.5 |
| AD-266862.1 | 1.9 | 0.3 | 34.4 | 2.7 |
| AD-267002.1 | 2.1 | 0.3 | 33.3 | 2.9 |
| AD-266816.1 | 1.6 | 0.4 | 19.6 | 3.1 |
| AD-266857.1 | 1.6 | 0.2 | 21.8 | 1.6 |
| AD-266902.1 | 3.9 | 0.6 | 51.7 | 5.0 |
| AD-267086.1 | 2.8 | 0.1 | 39.0 | 4.4 |
| AD-266785.1 | 4.6 | 0.4 | 56.5 | 3.5 |
| AD-266897.1 | 2.7 | 0.4 | 34.1 | 4.4 |
| AD-266896.1 | 17.2 | 2.1 | 73.2 | 9.5 |
| AD-266858.1 | 2.8 | 0.6 | 49.9 | 12.5 |
| AD-267084.1 | 5.8 | 1.7 | 80.7 | 26.6 |
| AD-266815.1 | 9.6 | 1.2 | 76.0 | 4.2 |
| AD-267007.1 | 1.6 | 0.4 | 24.1 | 3.0 |
| AD-266855.1 | 1.2 | 0.3 | 14.0 | 1.5 |
| AD-266901.1 | 3.3 | 1.1 | 38.8 | 3.2 |
| AD-266994.1 | 1.9 | 0.4 | 25.0 | 1.9 |
| AD-266793.1 | 3.6 | 0.5 | 50.0 | 4.7 |
| AD-266850.1 | 2.9 | 0.2 | 42.0 | 4.9 |
| AD-266887.1 | 1.8 | 0.0 | 22.8 | 3.2 |
| AD-266894.1 | 4.3 | 0.4 | 50.6 | 5.4 |
| AD-266988.1 | 2.2 | 0.4 | 37.4 | 8.8 |
| AD-267085.1 | 6.6 | 1.4 | 78.5 | 20.6 |
| AD-266873.1 | 2.4 | 0.4 | 41.7 | 6.0 |
| AD-266907.1 | 8.3 | 0.9 | 60.5 | 5.7 |
| AD-266792.1 | 4.8 | 0.6 | 44.5 | 3.8 |
| AD-266900.1 | 3.0 | 0.6 | 33.8 | 1.4 |
| AD-266797.1 | 4.9 | 0.4 | 54.4 | 6.1 |
| AD-266787.1 | 2.5 | 0.6 | 32.0 | 1.8 |
| AD-266800.1 | 2.1 | 0.2 | 31.9 | 3.6 |
| AD-266889.1 | 1.9 | 0.2 | 18.1 | 2.2 |
| AD-266847.1 | 7.2 | 0.8 | 71.6 | 31.4 |
| AD-266998.1 | 3.8 | 0.5 | 65.0 | 26.6 |
| AD-266790.1 | 2.7 | 0.2 | 52.9 | 4.8 |
| AD-266906.1 | 57.9 | 5.2 | 81.0 | 4.8 |
| AD-266854.1 | 3.1 | 0.7 | 42.7 | 3.1 |
| AD-266890.1 | 2.4 | 0.2 | 25.6 | 2.1 |
| AD-266808.1 | 6.0 | 1.5 | 63.3 | 4.7 |
| AD-266905.1 | 1.7 | 0.4 | 19.7 | 1.6 |
| AD-267024.1 | 1.1 | 0.2 | 12.4 | 1.4 |
| AD-266781.1 | 2.3 | 0.3 | 26.2 | 4.1 |
| AD-266892.1 | 11.0 | 2.8 | 68.7 | 7.7 |
| AD-266999.1 | 7.5 | 2.9 | 88.9 | 7.0 |
| AD-266841.1 | 1.5 | 0.3 | 16.1 | 1.8 |
| AD-266908.1 | 2.7 | 0.1 | 42.2 | 6.2 |
| AD-267005.1 | 1.9 | 0.3 | 20.8 | 3.4 |
| AD-266942.1 | 9.4 | 1.9 | 70.3 | 5.6 |
| AD-135967.3 | 2.4 | 0.3 | 31.6 | 1.4 |
| AD-266786.1 | 11.2 | 0.9 | 74.2 | 26.2 |
| AD-267064.1 | 1.7 | 0.4 | 25.3 | 8.1 |
| AD-266845.1 | 2.7 | 0.4 | 48.8 | 12.7 |
| AD-266944.1 | 3.3 | 1.1 | 40.5 | 14.5 |
| AD-267003.1 | 5.9 | 1.3 | 100.7 | 5.4 |
| AD-266860.1 | 5.9 | 0.7 | 75.1 | 7.3 |
| AD-266990.1 | 1.4 | 0.0 | 13.7 | 1.5 |
| AD-266853.1 | 2.2 | 0.3 | 31.7 | 3.7 |
| AD-266782.1 | 1.8 | 0.3 | 44.6 | 7.5 |
| AD-266962.1 | 2.1 | 0.6 | 33.3 | 4.2 |
| AD-267079.1 | 1.7 | 0.1 | 29.1 | 6.6 |
| AD-266846.1 | 1.9 | 0.6 | 41.7 | 13.0 |
| AD-266961.1 | 5.1 | 2.8 | 72.8 | 19.3 |
| AD-267061.1 | 4.8 | 1.7 | 65.6 | 11.1 |

TABLE 9
Superoxide Dismutase 1 In Vitro Single Dose
Screens in Primary Mouse Hepatocytes (PMH)

| | |
|---|---|
| Dose - Unit | Dose - Unit |
| 10 - nM | 0.1 - nM |

| Duplex | Avg | SD | Avg | SD |
|---|---|---|---|---|
| AD-266859.1 | 76.4 | 36.1 | 51.0 | 22.7 |
| AD-266997.1 | 60.0 | 20.9 | 51.8 | 4.2 |
| AD-266992.1 | 29.1 | 34.9 | 24.7 | 27.9 |
| AD-266903.1 | 48.1 | 13.8 | 47.6 | 16.2 |
| AD-266891.1 | 36.1 | 7.9 | 47.3 | 7.4 |
| AD-266996.1 | 67.0 | 28.3 | 67.5 | 25.6 |
| AD-266893.1 | 0.5 | 0.5 | 21.0 | 23.7 |
| AD-266898.1 | 58.6 | 17.9 | 89.5 | 56.8 |
| AD-266886.1 | 65.0 | 7.4 | 77.3 | 33.0 |
| AD-267072.1 | 4.8 | 9.2 | 104.7 | 66.4 |
| AD-267067.1 | 64.5 | 9.7 | 98.0 | 55.1 |
| AD-266791.1 | 2.2 | 2.8 | 52.1 | 7.0 |
| AD-266789.1 | 43.9 | 6.8 | 52.7 | 7.8 |
| AD-266861.1 | 60.5 | 23.4 | 50.9 | 7.5 |
| AD-266856.1 | 52.6 | 18.3 | 51.7 | 6.7 |
| AD-266899.1 | 72.0 | 12.2 | 58.1 | 14.2 |
| AD-267000.1 | 67.3 | 14.4 | 65.8 | 16.5 |
| AD-267071.1 | 0.3 | 0.1 | 27.9 | 7.2 |
| AD-266895.1 | 63.4 | 11.5 | 79.5 | 13.7 |
| AD-266888.1 | 2.1 | 0.6 | 75.6 | 27.2 |
| AD-266817.1 | 82.2 | 47.3 | 113.0 | 37.6 |
| AD-267083.1 | 89.1 | 42.8 | 122.5 | 36.2 |
| AD-266862.1 | 63.3 | 29.2 | 53.6 | 12.6 |
| AD-267002.1 | 46.8 | 9.0 | 64.5 | 9.9 |
| AD-266816.1 | 0.9 | 0.4 | 49.2 | 0.5 |
| AD-266857.1 | 58.6 | 14.7 | 64.5 | 6.3 |
| AD-266847.1 | 78.3 | 16.4 | 104.9 | 34.1 |
| AD-266998.1 | 79.2 | 23.4 | 114.2 | 52.0 |
| AD-266790.1 | 38.1 | 7.4 | 54.4 | 15.0 |
| AD-266906.1 | 44.1 | 8.5 | 49.5 | 4.1 |
| AD-266854.1 | 57.1 | 20.8 | 53.8 | 5.8 |
| AD-266890.1 | 4.8 | 3.7 | 48.7 | 3.0 |
| AD-266808.1 | 72.0 | 18.8 | 74.9 | 17.7 |
| AD-266905.1 | 72.0 | 12.3 | 71.2 | 3.1 |
| AD-267024.1 | 0.6 | 0.3 | 30.8 | 4.4 |
| AD-266781.1 | 73.5 | 13.8 | 88.8 | 14.6 |
| AD-266892.1 | 76.1 | 15.8 | 90.7 | 29.4 |
| AD-266999.1 | 96.0 | 59.3 | 114.2 | 44.5 |
| AD-266841.1 | 7.7 | 4.4 | 42.4 | 13.5 |
| AD-266908.1 | 44.5 | 4.9 | 50.5 | 16.1 |
| AD-267005.1 | 2.6 | 1.4 | 48.4 | 10.5 |
| AD-266942.1 | 1.2 | 0.6 | 47.2 | 11.7 |
| AD-266902.1 | 74.0 | 21.2 | 70.1 | 19.7 |
| AD-267086.1 | 67.0 | 17.7 | 84.8 | 17.6 |
| AD-266785.1 | 21.9 | 10.5 | 71.9 | 10.0 |
| AD-266897.1 | 62.2 | 15.8 | 80.2 | 22.7 |
| AD-266896.1 | 72.7 | 18.4 | 66.8 | 16.7 |
| AD-266858.1 | 67.0 | 15.8 | 80.7 | 14.9 |
| AD-267084.1 | 79.2 | 28.4 | 110.7 | 45.7 |
| AD-266815.1 | 56.9 | 21.6 | 54.6 | 7.2 |
| AD-267007.1 | 0.4 | 0.1 | 31.6 | 7.3 |
| AD-266855.1 | 62.3 | 12.9 | 59.6 | 1.8 |
| AD-266901.1 | 64.5 | 13.2 | 61.6 | 13.7 |
| AD-266994.1 | 75.0 | 16.8 | 75.0 | 12.9 |
| AD-266793.1 | 68.3 | 9.5 | 84.9 | 15.4 |
| AD-266850.1 | 87.1 | 23.7 | 88.8 | 12.4 |
| AD-266887.1 | 5.6 | 3.0 | 96.5 | 10.9 |
| AD-266894.1 | 7.8 | 5.7 | 97.4 | 7.4 |
| AD-266988.1 | 71.6 | 14.6 | 86.0 | 11.7 |
| AD-267085.1 | 17.8 | 11.0 | 116.2 | 52.3 |
| AD-266873.1 | 0.1 | 0.0 | 21.6 | 5.2 |
| AD-266907.1 | 48.3 | 13.4 | 49.6 | 2.9 |
| AD-266792.1 | 55.4 | 16.5 | 65.4 | 16.5 |
| AD-266900.1 | 63.9 | 20.6 | 69.0 | 5.7 |
| AD-266797.1 | 64.6 | 20.7 | 72.8 | 11.8 |
| AD-266787.1 | 41.6 | 8.9 | 78.8 | 7.8 |
| AD-266800.1 | 83.6 | 21.8 | 86.3 | 11.2 |
| AD-266889.1 | 0.8 | 0.3 | 80.4 | 11.7 |
| AD-135967.3 | 0.2 | 0.1 | 38.8 | 27.3 |
| AD-266786.1 | 62.0 | 14.7 | 93.1 | 40.3 |
| AD-267064.1 | 71.8 | 15.9 | 70.7 | 11.3 |
| AD-266845.1 | 75.7 | 27.7 | 99.4 | 61.4 |
| AD-266944.1 | 0.6 | 0.2 | 72.2 | 38.7 |
| AD-267003.1 | 118.9 | 75.9 | 156.4 | 51.6 |
| AD-266860.1 | 39.3 | 8.1 | 24.6 | 16.1 |
| AD-266990.1 | 38.7 | 9.2 | 21.2 | 14.6 |
| AD-266853.1 | 37.8 | 37.7 | 15.2 | 17.2 |
| AD-266782.1 | 38.6 | 32.7 | 41.6 | 34.4 |
| AD-266962.1 | 0.4 | 0.2 | 28.8 | 19.9 |
| AD-267079.1 | 0.2 | 0.1 | 20.1 | 23.0 |
| AD-266846.1 | 62.8 | 8.1 | 85.3 | 66.2 |
| AD-266961.1 | 40.3 | 20.5 | 59.0 | 11.0 |
| AD-267061.1 | 87.4 | 31.4 | 110.3 | 49.9 |

TABLE 10
Superoxide Dismutase 1 In Vitro Single Dose Screens
in Primary Cynomolgus Hepatocytes (PCH) cells

| | |
|---|---|
| Dose - Unit | Dose - Unit |
| 10 - nM | 0.1 - nM |

| Duplex | Avg | SD | Avg | SD |
|---|---|---|---|---|
| AD-135962.1 | 83.19 | 8.92 | 101.60 | 7.55 |
| AD-135963.1 | 45.58 | 1.94 | 98.64 | 9.66 |
| AD-135964.1 | 5.28 | 0.63 | 49.17 | 5.26 |
| AD-135967.5 | 4.25 | 0.39 | 37.19 | 3.98 |
| AD-135974.3 | 5.42 | 1.40 | 45.31 | 3.47 |
| AD-266788.1 | 3.93 | 0.78 | 37.67 | 4.27 |
| AD-266789.2 | 26.33 | 3.94 | 96.69 | 5.67 |
| AD-266790.2 | 6.26 | 0.53 | 44.79 | 2.51 |
| AD-266791.3 | 2.20 | 0.29 | 24.12 | 3.18 |
| AD-266794.1 | 12.48 | 1.11 | 74.79 | 3.70 |
| AD-266798.1 | 11.78 | 1.66 | 66.55 | 9.45 |
| AD-266799.1 | 8.19 | 1.19 | 70.59 | 4.84 |
| AD-266801.1 | 13.29 | 1.01 | 87.14 | 4.40 |
| AD-266802.1 | 19.56 | 4.86 | 74.12 | 6.09 |
| AD-266803.1 | 4.12 | 0.71 | 54.10 | 12.04 |
| AD-266804.1 | 7.57 | 1.06 | 75.49 | 7.11 |
| AD-266805.1 | 79.23 | 3.60 | 91.30 | 7.81 |
| AD-266806.1 | 18.66 | 0.31 | 82.02 | 4.98 |
| AD-266808.2 | 9.95 | 1.04 | 81.05 | 4.63 |
| AD-266832.1 | 43.37 | 3.77 | 99.19 | 3.54 |
| AD-266834.1 | 4.39 | 1.02 | 36.56 | 8.26 |
| AD-266836.1 | 74.92 | 2.31 | 91.29 | 5.81 |
| AD-266837.1 | 28.04 | 3.97 | 101.92 | 7.61 |
| AD-266838.1 | 3.40 | 0.72 | 32.93 | 1.02 |
| AD-266839.1 | 7.64 | 1.23 | 61.20 | 5.51 |
| AD-266840.1 | 4.65 | 0.80 | 51.48 | 7.19 |
| AD-266841.3 | 2.35 | 0.51 | 20.69 | 3.24 |
| AD-266886.2 | 5.26 | 1.22 | 60.65 | 4.88 |
| AD-266887.3 | 2.21 | 0.16 | 36.90 | 7.14 |
| AD-266888.2 | 4.78 | 0.28 | 49.47 | 1.84 |
| AD-266890.3 | 6.38 | 1.33 | 34.83 | 4.96 |
| AD-266891.2 | 13.25 | 0.53 | 79.79 | 5.06 |
| AD-266892.2 | 20.45 | 3.03 | 82.90 | 5.65 |
| AD-266899.2 | 13.48 | 2.79 | 75.57 | 6.33 |
| AD-266900.3 | 5.86 | 1.58 | 40.45 | 2.63 |
| AD-266901.2 | 4.08 | 1.07 | 46.32 | 3.22 |
| AD-266928.1 | 87.89 | 3.19 | 104.83 | 10.57 |
| AD-266934.1 | 10.50 | 2.75 | 89.20 | 1.11 |
| AD-266936.1 | 5.20 | 1.59 | 57.85 | 12.38 |
| AD-266938.1 | 5.76 | 0.67 | 55.29 | 3.26 |
| AD-266939.1 | 3.47 | 0.62 | 37.20 | 7.60 |
| AD-266940.1 | 8.36 | 1.54 | 83.30 | 13.87 |
| AD-266941.1 | 9.85 | 1.24 | 81.42 | 3.29 |
| AD-266943.1 | 17.56 | 2.41 | 88.20 | 4.40 |
| AD-267035.1 | 21.32 | 1.33 | 87.91 | 4.72 |
| AD-267058.1 | 4.60 | 0.36 | 45.53 | 3.39 |
| AD-267059.1 | 5.06 | 0.87 | 45.02 | 6.93 |
| AD-267060.1 | 23.86 | 2.69 | 108.98 | 16.46 |
| AD-267073.1 | 11.04 | 1.93 | 83.91 | 9.60 |
| AD-267075.1 | 15.92 | 2.72 | 187.79 | 125.27 |
| AD-267076.1 | 63.80 | 5.42 | 87.64 | 8.46 |
| AD-267118.1 | 24.21 | 1.80 | 88.65 | 9.90 |
| AD-267119.1 | 54.00 | 4.01 | 97.77 | 3.05 |
| AD-267120.1 | 14.75 | 0.67 | 89.26 | 7.34 |
| AD-267121.1 | 8.76 | 1.55 | 77.47 | 8.50 |
| AD-267122.1 | 16.43 | 1.70 | 89.44 | 4.75 |
| AD-295644.1 | 50.36 | 7.62 | 96.21 | 5.50 |
| AD-295645.1 | 6.17 | 1.20 | 64.53 | 6.70 |
| AD-295646.1 | 11.96 | 1.00 | 73.74 | 2.20 |
| AD-295647.1 | 13.07 | 3.08 | 97.30 | 3.11 |
| AD-295648.1 | 15.63 | 0.98 | 88.39 | 8.08 |
| AD-295649.1 | 2.44 | 0.75 | 41.73 | 17.58 |
| AD-295651.1 | 2.73 | 1.12 | 34.65 | 3.73 |
| AD-295652.1 | 4.15 | 0.60 | 36.36 | 2.77 |
| AD-295653.1 | 19.69 | 2.24 | 76.48 | 3.43 |
| AD-295661.1 | 82.29 | 10.31 | 109.30 | 4.05 |
| AD-295685.1 | 96.98 | 6.95 | 107.38 | 2.09 |
| AD-295688.1 | 29.20 | 1.19 | 90.67 | 7.33 |
| AD-295689.1 | 83.92 | 12.63 | 96.81 | 3.43 |
| AD-295692.1 | 4.09 | 1.47 | 39.47 | 3.40 |
| AD-295795.1 | 90.87 | 13.20 | 91.02 | 8.08 |
| AD-295796.1 | 93.36 | 6.57 | 101.37 | 9.46 |
| AD-295827.1 | 36.07 | 4.64 | 84.17 | 4.85 |
| AD-295828.1 | 59.84 | 2.83 | 105.17 | 14.92 |
| AD-295831.1 | 89.14 | 4.03 | 109.23 | 12.98 |
| AD-295856.1 | 12.43 | 2.28 | 74.44 | 6.83 |
| AD-295857.1 | 14.73 | 1.83 | 73.35 | 5.77 |
| AD-295858.1 | 4.41 | 0.68 | 43.87 | 2.79 |
| AD-295867.1 | 72.40 | 3.25 | 105.71 | 1.62 |
| AD-295868.1 | 18.79 | 1.83 | 92.79 | 5.86 |
| AD-295869.1 | 16.91 | 2.13 | 86.65 | 12.21 |
| AD-295870.1 | 13.84 | 1.24 | 80.22 | 4.93 |
| AD-295871.1 | 8.36 | 1.51 | 84.76 | 7.34 |
| AD-295872.1 | 12.59 | 2.47 | 67.76 | 2.99 |
| AD-295874.1 | 9.68 | 1.33 | 86.08 | 14.84 |
| AD-295879.1 | 26.38 | 1.68 | 102.12 | 3.87 |
| AD-295880.1 | 56.67 | 5.40 | 92.87 | 7.90 |
| AD-295897.1 | 7.20 | 2.16 | 72.12 | 5.62 |
| AD-295898.1 | 7.50 | 1.96 | 66.17 | 3.69 |
| AD-295899.1 | 18.36 | 1.08 | 75.37 | 6.79 |
| AD-295900.1 | 34.17 | 4.15 | 82.75 | 4.97 |
| AD-295901.1 | 78.50 | 9.63 | 99.36 | 8.09 |
| AD-295902.1 | 39.46 | 0.94 | 85.36 | 8.06 |
| AD-295904.1 | 81.60 | 3.70 | 122.37 | 38.87 |

TABLE 11
Superoxide Dismutase 1 In Vitro Single Dose Screens
in Primary Cynomolgus Hepatocytes (PCH) cells

| | |
|---|---|
| Dose - Unit | Dose - Unit |
| 10 - nM | 0.1 - nM |

| Duplex | Avg | SD | Avg | SD |
|---|---|---|---|---|
| AD-301535.1 | 98.03 | 4.84 | 103.16 | 4.23 |
| AD-301536.1 | 13.08 | 3.95 | 91.41 | 4.56 |
| AD-301537.1 | 90.15 | 2.62 | 98.10 | 3.83 |
| AD-301538.1 | 78.20 | 1.84 | 99.10 | 2.94 |
| AD-301539.1 | 17.73 | 1.91 | 93.38 | 5.78 |
| AD-301540.1 | 4.00 | 1.11 | 18.66 | 3.72 |
| AD-301542.1 | 4.10 | 0.15 | 16.46 | 1.70 |
| AD-301543.1 | 19.93 | 2.34 | 42.34 | 2.20 |
| AD-301544.1 | 46.92 | 1.85 | 91.07 | 7.70 |
| AD-301549.1 | 7.47 | 2.11 | 36.82 | 2.61 |
| AD-301550.1 | 81.19 | 4.70 | 93.06 | 2.17 |
| AD-301551.1 | 12.82 | 2.60 | 59.20 | 4.04 |
| AD-301552.1 | 4.02 | 0.81 | 11.54 | 3.27 |
| AD-301555.1 | 16.41 | 2.27 | 79.37 | 2.67 |
| AD-301559.1 | 63.74 | 4.62 | 86.68 | 6.17 |
| AD-301560.1 | 26.30 | 2.05 | 81.69 | 5.23 |
| AD-301562.1 | 11.59 | 0.41 | 62.13 | 4.15 |
| AD-301563.1 | 13.26 | 3.63 | 82.33 | 8.84 |
| AD-301564.1 | 8.00 | 2.00 | 44.21 | 2.37 |
| AD-301565.1 | 93.58 | 18.36 | 91.71 | 5.14 |
| AD-301566.1 | 91.41 | 6.74 | 94.53 | 6.85 |
| AD-301567.1 | 81.95 | 2.20 | 92.89 | 1.58 |
| AD-301569.1 | 13.38 | 2.26 | 85.15 | 7.45 |
| AD-301579.1 | 98.66 | 3.16 | 93.09 | 6.57 |
| AD-301593.1 | 92.38 | 3.29 | 98.75 | 2.28 |
| AD-301594.1 | 7.28 | 0.98 | 64.65 | 3.75 |
| AD-301596.1 | 100.90 | 2.95 | 101.04 | 4.27 |
| AD-301597.1 | 9.98 | 1.83 | 67.09 | 2.22 |
| AD-301598.1 | 4.24 | 0.87 | 27.83 | 2.99 |
| AD-301599.1 | 9.11 | 0.46 | 66.87 | 2.62 |
| AD-301600.1 | 8.37 | 0.52 | 65.13 | 1.96 |
| AD-301601.1 | 27.44 | 1.54 | 74.81 | 1.51 |
| AD-301612.1 | 105.54 | 2.23 | 101.38 | 3.70 |
| AD-301615.1 | 86.32 | 2.18 | 93.33 | 4.73 |
| AD-301616.1 | 96.28 | 2.34 | 95.39 | 2.41 |
| AD-301619.1 | 56.80 | 2.91 | 76.46 | 3.60 |
| AD-301648.1 | 7.79 | 0.88 | 77.88 | 5.67 |
| AD-301649.1 | 12.76 | 1.77 | 70.13 | 3.81 |
| AD-301650.1 | 53.37 | 7.81 | 81.48 | 2.45 |
| AD-301652.1 | 22.62 | 0.96 | 63.95 | 3.43 |
| AD-301653.1 | 52.02 | 3.26 | 88.05 | 6.54 |
| AD-301654.1 | 47.36 | 2.57 | 95.09 | 4.89 |
| AD-301661.1 | 43.53 | 4.13 | 85.28 | 4.94 |
| AD-301662.1 | 47.23 | 5.69 | 88.54 | 3.58 |
| AD-301663.1 | 5.86 | 0.94 | 48.62 | 2.08 |
| AD-301688.1 | 91.87 | 1.85 | 98.28 | 4.04 |
| AD-301690.1 | 88.47 | 3.32 | 98.93 | 2.85 |
| AD-301697.1 | 4.24 | 0.46 | 34.14 | 5.74 |
| AD-301699.1 | 4.18 | 0.12 | 16.49 | 3.39 |
| AD-301700.1 | 10.31 | 1.39 | 53.80 | 6.12 |
| AD-301701.1 | 14.10 | 2.33 | 87.21 | 3.78 |
| AD-301702.1 | 37.88 | 3.57 | 99.22 | 6.26 |
| AD-301703.1 | 87.54 | 6.72 | 96.03 | 1.28 |
| AD-301706.1 | 75.02 | 2.08 | 94.98 | 5.30 |
| AD-301764.1 | 106.66 | 3.34 | 104.25 | 4.60 |
| AD-301765.1 | 92.11 | 4.56 | 97.95 | 4.52 |
| AD-301799.1 | 85.29 | 2.57 | 97.06 | 2.86 |
| AD-301824.1 | 51.16 | 1.47 | 92.79 | 4.17 |
| AD-301825.1 | 41.28 | 3.29 | 83.80 | 4.54 |
| AD-301826.1 | 78.25 | 14.04 | 88.09 | 3.75 |
| AD-301827.1 | 83.51 | 5.58 | 98.20 | 7.25 |
| AD-301828.1 | 5.26 | 0.41 | 39.91 | 3.31 |
| AD-301829.1 | 7.69 | 0.33 | 39.97 | 1.79 |
| AD-301830.1 | 21.72 | 1.98 | 91.45 | 6.31 |
| AD-301843.1 | 26.53 | 2.76 | 89.45 | 3.20 |
| AD-301845.1 | 19.80 | 4.82 | 93.62 | 7.53 |
| AD-301846.1 | 22.54 | 3.19 | 94.07 | 2.15 |
| AD-301847.1 | 89.51 | 1.30 | 99.77 | 2.02 |
| AD-301848.1 | 99.23 | 4.92 | 100.84 | 7.65 |
| AD-301849.1 | 5.32 | 0.70 | 30.99 | 3.27 |
| AD-301850.1 | 88.76 | 2.72 | 94.06 | 3.16 |
| AD-301852.1 | 4.61 | 0.15 | 20.03 | 3.42 |
| AD-301859.1 | 7.06 | 0.40 | 44.19 | 1.61 |
| AD-301860.1 | 5.80 | 1.55 | 33.00 | 5.38 |
| AD-301873.1 | 93.07 | 4.80 | 95.72 | 2.66 |
| AD-301874.1 | 94.25 | 5.82 | 99.41 | 6.79 |
| AD-301875.1 | 97.60 | 6.57 | 98.62 | 4.21 |
| AD-301876.1 | 38.17 | 1.34 | 90.73 | 3.16 |
| AD-301877.1 | 48.77 | 2.53 | 93.26 | 2.44 |
| AD-301878.1 | 51.91 | 2.81 | 89.98 | 4.17 |
| AD-301880.1 | 36.41 | 2.32 | 78.14 | 2.74 |
| AD-301901.1 | 98.04 | 5.09 | 98.26 | 3.62 |
| AD-301902.1 | 89.05 | 1.95 | 100.83 | 2.70 |
| AD-301903.1 | 95.54 | 5.42 | 102.78 | 3.31 |
| AD-301904.1 | 96.36 | 5.22 | 97.39 | 2.37 |
| AD-301905.1 | 90.02 | 3.46 | 97.35 | 2.27 |
| AD-301906.1 | 77.52 | 1.57 | 99.69 | 6.26 |
| AD-301907.1 | 82.84 | 3.43 | 91.36 | 4.32 |
| AD-301908.1 | 81.82 | 2.51 | 95.34 | 6.79 |
| AD-301909.1 | 61.89 | 1.32 | 89.93 | 3.70 |
| AD-301910.1 | 70.37 | 2.00 | 95.73 | 4.15 |
| AD-301911.1 | 12.59 | 1.24 | 84.00 | 5.08 |
| AD-301912.1 | 53.89 | 4.10 | 97.43 | 4.16 |
| AD-301918.1 | 69.96 | 8.26 | 91.14 | 5.80 |

### Example 2. Design, Synthesis and In Vitro Screening of Additional dsRNA Duplexes

[0986] Based on the results provided in Example 1, additional siRNAs targeting identified hot spots in SOD1 mRNA were designed, synthesized and prepared using methods known in the art and described above in Example 1.

[0987] Detailed lists of the additional unmodified SOD1 sense and antisense strand nucleotide sequences are shown in Table 12. Detailed lists of the modified SOD1 sense and antisense strand nucleotide sequences are shown in Table 13.

[0988] Single dose screens of the additional agents were performed by transfection. Experiments were performed at 50 mM, 10 nM, 1 nM and 0.1 nM in primary cynomolgus hepatocytes (PCH) or neuroblastoma Be(2)C cells.

[0989] Total RNA isolation was performed using DYNABEADS. Briefly, cells were lysed in 10 μl of Lysis/Binding Buffer containing 3 μL of beads per well and mixed for 10 minutes on an electrostatic shaker. The washing steps were automated on a Biotek EL406, using a magnetic plate support. Beads were washed (in 3 μL) once in Buffer A, once in Buffer B, and twice in Buffer E, with aspiration steps in between. Following a final aspiration, complete 12 μL RT mixture was added to each well, as described below.

[0990] For cDNA synthesis, a master mix of 1.5 μl 10× Buffer, 0.6 μl 10×dNTPs, 1.5 μl Random primers, 0.75 μl Reverse Transcriptase, 0.75 μl RNase inhibitor and 9.9 μl of H2O per reaction were added per well. Plates were sealed, agitated for 10 minutes on an electrostatic shaker, and then incubated at 37° C. for 2 hours. Following this, the plates were agitated at 80° C. for 8 minutes.

[0991] RT-qPCR was performed as described above and relative fold change was calculated as described above.

[0992] The results of the transfection assays in PCH cells are shown in Table 14 and the results of the transfection assays in BE(2)C cells are shown in Table 15, and illustrated as stacked bar graphs in FIGS. 12A-12H (as mapped to NM_00454.6).

TABLE 12
Unmodified Sense and Antisense Strand Sequences of Superoxide Dismutase 1 dsRNA Agents

| | | | Range in GenBank Acession | | | | Range in GenBank Acession | |
|---|---|---|---|---|---|---|---|---|
| | | | No. NM_ | | | | No. NM_ | |
| Duplex Name | Sense Sequence 5′ to 3′ | SEQ ID NO: | 001285406.1 | 000454.4 | Antisense Sequence 5′ to 3′ | SEQ ID NO: | 001285406.1 | 000454.5 |
| AD-1321202.1 | UCAUCAAUUUCGAGCAGAAGU | 499 | 53-73 | 201-221 | ACUUCUGCUCGAAAUUGAUGAUG | 578 | 51-73 | 199-221 |
| AD-1321203.1 | CAUCAAUUUCGAGCAGAAGGA | 975 | 54-74 | 202-222 | ACCUUCUGCUCGAAAUUGAUGAU | 1009 | 52-74 | 200-222 |
| AD-1321204.1 | AUCAAUUUCGAGCAGAAGGAA | 63 | 55-75 | 203-223 | UUCCTUCUGCUCGAAAUUGAUGA | 1010 | 53-75 | 201-223 |
| AD-1321205.1 | UCAAUUUCGAGCAGAAGGAAA | 104 | 56-76 | 204-224 | UUUCCUTCUGCUCGAAAUUGAUG | 1011 | 54-76 | 202-224 |
| AD-1321206.1 | CAAUUUCGAGCAGAAGGAAAU | 84 | 57-77 | 205-225 | AUUUCCTUCUGCUCGAAAUUGAU | 1012 | 55-77 | 203-225 |
| AD-1321207.1 | AAUUUCGAGCAGAAGGAAAGU | 454 | 58-78 | 206-226 | ACUUTCCUUCUGCUCGAAAUUGA | 1013 | 56-78 | 204-226 |
| AD-1321208.1 | AUUUCGAGCAGAAGGAAAGUA | 47 | 59-79 | 207-227 | UACUTUCCUUCUGCUCGAAAUUG | 1014 | 57-79 | 205-227 |
| AD-1321209.1 | UUUCGAGCAGAAGGAAAGUAA | 89 | 60-80 | 208-228 | UUACTUTCCUUCUGCUCGAAAUU | 1015 | 58-80 | 206-228 |
| AD-1321210.1 | UUCGAGCAGAAGGAAAGUAAU | 46 | 61-81 | 209-229 | AUUACUTUCCUUCUGCUCGAAAU | 850 | 59-81 | 207-229 |
| AD-1321211.1 | UCGAGCAGAAGGAAAGUAAUU | 81 | 62-82 | 210-230 | AAUUACTUUCCUUCUGCUCGAAA | 1016 | 60-82 | 208-230 |
| AD-1321212.1 | CGAGCAGAAGGAAAGUAAUGU | 73 | 63-83 | 211-231 | ACAUUACUUUCCUUCUGCUCGAA | 156 | 61-83 | 209-231 |
| AD-1321213.1 | GAGCAGAAGGAAAGUAAUGGA | 455 | 64-84 | 212-232 | ACCAUUACUUUCCUUCUGCUCGA | 1017 | 62-84 | 210-232 |
| AD-1321214.1 | AGCAGAAGGAAAGUAAUGGAU | 976 | 65-85 | 213-233 | AUCCAUUACUUUCCUUCUGCUCG | 1018 | 63-85 | 211-233 |
| AD-1321215.1 | GCAGAAGGAAAGUAAUGGACU | 977 | 66-86 | 214-234 | AGUCCATUACUUUCCUUCUGCUC | 1019 | 64-86 | 212-234 |
| AD-1321216.1 | CAGAAGGAAAGUAAUGGACCA | 83 | 67-87 | 215-235 | UGGUCCAUUACUUUCCUUCUGCU | 166 | 65-87 | 213-235 |
| AD-1321217.1 | AGAAGGAAAGUAAUGGACCAU | 456 | 68-88 | 216-236 | AUGGTCCAUUACUUUCCUUCUGC | 1020 | 66-88 | 214-236 |
| AD-1321218.1 | GAAGGAAAGUAAUGGACCAGU | 457 | 69-89 | 217-237 | ACUGGUCCAUUACUUUCCUUCUG | 536 | 67-89 | 215-237 |
| AD-1321219.1 | AAGGAAAGUAAUGGACCAGUU | 85 | 70-90 | 218-238 | AACUGGTCCAUUACUUUCCUUCU | 1021 | 68-90 | 216-238 |
| AD-1321220.1 | AGGAAAGUAAUGGACCAGUGA | 458 | 71-91 | 219-239 | UCACTGGUCCAUUACUUUCCUUC | 1022 | 69-91 | 217-239 |
| AD-1321221.1 | GGAAAGUAAUGGACCAGUGAA | 459 | 72-92 | 220-240 | UUCACUGGUCCAUUACUUUCCUU | 538 | 70-92 | 218-240 |
| AD-1321222.1 | GAAAGUAAUGGACCAGUGAAU | 460 | 73-93 | 221-241 | AUUCACTGGUCCAUUACUUUCCU | 851 | 71-93 | 219-241 |
| AD-1321223.1 | AAAGUAAUGGACCAGUGAAGU | 461 | 74-94 | 222-242 | ACUUCACUGGUCCAUUACUUUCC | 540 | 72-94 | 220-242 |
| AD-1321224.1 | AAGUAAUGGACCAGUGAAGGU | 462 | 75-95 | 223-243 | ACCUUCACUGGUCCAUUACUUUC | 541 | 73-95 | 221-243 |
| AD-1321225.1 | AGUAAUGGACCAGUGAAGGUU | 463 | 76-96 | 224-244 | AACCTUCACUGGUCCAUUACUUU | 1023 | 74-96 | 222-244 |
| AD-1321226.1 | GUAAUGGACCAGUGAAGGUGU | 978 | 77-97 | 225-245 | ACACCUUCACUGGUCCAUUACUU | 1024 | 75-97 | 223-245 |
| AD-1321227.1 | UAAUGGACCAGUGAAGGUGUU | 93 | 78-98 | 226-246 | AACACCUUCACUGGUCCAUUACU | 176 | 76-98 | 224-246 |
| AD-1321228.1 | AAUGGACCAGUGAAGGUGUGU | 979 | 79-99 | 227-247 | ACACACCUUCACUGGUCCAUUAC | 1025 | 77-99 | 225-247 |
| AD-1321229.1 | GUACCAGUGCAGGUCCUCACU | 980 | 173-193 | 321-341 | AGUGAGGACCUGCACUGGUACAG | 1026 | 171-193 | 319-341 |
| AD-1321230.1 | UACCAGUGCAGGUCCUCACUU | 981 | 174-194 | 322-342 | AAGUGAGGACCUGCACUGGUACA | 1027 | 172-194 | 320-342 |
| AD-1321231.1 | ACCAGUGCAGGUCCUCACUUU | 43 | 175-195 | 323-343 | AAAGTGAGGACCUGCACUGGUAC | 1028 | 173-195 | 321-343 |
| AD-1321232.1 | CCAGUGCAGGUCCUCACUUUA | 75 | 176-196 | 324-344 | UAAAGUGAGGACCUGCACUGGUA | 158 | 174-196 | 322-344 |
| AD-1321233.1 | CAGUGCAGGUCCUCACUUUAA | 54 | 177-197 | 325-345 | UUAAAGTGAGGACCUGCACUGGU | 857 | 175-197 | 323-345 |
| AD-1321234.1 | AGUGCAGGUCCUCACUUUAAU | 86 | 178-198 | 326-346 | AUUAAAGUGAGGACCUGCACUGG | 169 | 176-198 | 324-346 |
| AD-1321235.1 | GUGCAGGUCCUCACUUUAAUU | 92 | 179-199 | 327-347 | AAUUAAAGUGAGGACCUGCACUG | 175 | 177-199 | 325-347 |
| AD-1321236.1 | UGCAGGUCCUCACUUUAAUCU | 39 | 180-200 | 328-348 | AGAUUAAAGUGAGGACCUGCACU | 122 | 178-200 | 326-348 |
| AD-1321237.1 | GCAGGUCCUCACUUUAAUCCU | 97 | 181-201 | 329-349 | AGGAUUAAAGUGAGGACCUGCAC | 180 | 179-201 | 327-349 |
| AD-1321238.1 | CAGGUCCUCACUUUAAUCCUU | 41 | 182-202 | 330-350 | AAGGAUUAAAGUGAGGACCUGCA | 124 | 180-202 | 328-350 |
| AD-1321239.1 | AGGUCCUCACUUUAAUCCUCU | 76 | 183-203 | 331-351 | AGAGGAUUAAAGUGAGGACCUGC | 159 | 181-203 | 329-351 |
| AD-1321240.1 | GGUCCUCACUUUAAUCCUCUA | 53 | 184-204 | 332-352 | UAGAGGAUUAAAGUGAGGACCUG | 136 | 182-204 | 330-352 |
| AD-1321241.1 | GUCCUCACUUUAAUCCUCUAU | 65 | 185-205 | 333-353 | AUAGAGGAUUAAAGUGAGGACCU | 148 | 183-205 | 331-353 |
| AD-1321242.1 | UCCUCACUUUAAUCCUCUAUU | 64 | 186-206 | 334-354 | AAUAGAGGAUUAAAGUGAGGACC | 147 | 184-206 | 332-354 |
| AD-1321243.1 | CCUCACUUUAAUCCUCUAUCU | 42 | 187-207 | 335-355 | AGAUAGAGGAUUAAAGUGAGGAC | 125 | 185-207 | 333-355 |
| AD-1321244.1 | CUCACUUUAAUCCUCUAUCCA | 50 | 188-208 | 336-356 | AGGAUAGAGGAUUAAAGUGAGGA | 1029 | 186-208 | 334-356 |
| AD-1321245.1 | UCACUUUAAUCCUCUAUCCAU | 82 | 189-209 | 337-357 | AUGGAUAGAGGAUUAAAGUGAGG | 165 | 187-209 | 335-357 |
| AD-1321246.1 | CACUUUAAUCCUCUAUCCAGA | 71 | 190-210 | 338-358 | ACUGGAUAGAGGAUUAAAGUGAG | 1030 | 188-210 | 336-358 |
| AD-1321247.1 | ACUUUAAUCCUCUAUCCAGAA | 982 | 191-211 | 339-359 | UUCUGGAUAGAGGAUUAAAGUGA | 1031 | 189-211 | 337-359 |
| AD-1321248.1 | GUGGGCCAAAGGAUGAAGAGA | 983 | 218-238 | 366-386 | UCUCTUCAUCCUUUGGCCCACCG | 1032 | 216-238 | 364-386 |
| AD-1321249.1 | UGGGCCAAAGGAUGAAGAGAU | 984 | 219-239 | 367-387 | AUCUCUTCAUCCUUUGGCCCACC | 1033 | 217-239 | 365-387 |
| AD-1321250.1 | GGGCCAAAGGAUGAAGAGAGU | 985 | 220-240 | 368-388 | ACUCTCTUCAUCCUUUGGCCCAC | 1034 | 218-240 | 366-388 |
| AD-1321251.1 | GGCCAAAGGAUGAAGAGAGGU | 986 | 221-241 | 369-389 | ACCUCUCUUCAUCCUUUGGCCCA | 1035 | 219-241 | 367-389 |
| AD-1321252.1 | GCCAAAGGAUGAAGAGAGGCA | 987 | 222-242 | 370-390 | UGCCTCTCUUCAUCCUUUGGCCC | 1036 | 220-242 | 368-390 |
| AD-1321253.1 | CCAAAGGAUGAAGAGAGGCAU | 988 | 223-243 | 371-391 | AUGCCUCUCUUCAUCCUUUGGCC | 1037 | 221-243 | 369-391 |
| AD-1321254.1 | CAAAGGAUGAAGAGAGGCAUU | 473 | 224-244 | 372-392 | AAUGCCTCUCUUCAUCCUUUGGC | 860 | 222-244 | 370-392 |
| AD-1321255.1 | AAAGGAUGAAGAGAGGCAUGU | 989 | 225-245 | 373-393 | ACAUGCCUCUCUUCAUCCUUUGG | 1038 | 223-245 | 371-393 |
| AD-1321256.1 | AAGGAUGAAGAGAGGCAUGUU | 474 | 226-246 | 374-394 | AACATGCCUCUCUUCAUCCUUUG | 1039 | 224-246 | 372-394 |
| AD-1321257.1 | AGGAUGAAGAGAGGCAUGUUU | 475 | 227-247 | 375-395 | AAACAUGCCUCUCUUCAUCCUUU | 554 | 225-247 | 373-395 |
| AD-1321258.1 | GGAUGAAGAGAGGCAUGUUGU | 476 | 228-248 | 376-396 | ACAACAUGCCUCUCUUCAUCCUU | 555 | 226-248 | 374-396 |
| AD-1321259.1 | GAUGAAGAGAGGCAUGUUGGA | 472 | 229-249 | 377-397 | ACCAACAUGCCUCUCUUCAUCCU | 1040 | 227-249 | 375-397 |
| AD-1321260.1 | AUGAAGAGAGGCAUGUUGGAU | 477 | 230-250 | 378-398 | AUCCAACAUGCCUCUCUUCAUCC | 556 | 228-250 | 376-398 |
| AD-1321261.1 | UGAAGAGAGGCAUGUUGGAGA | 990 | 231-251 | 379-399 | ACUCCAACAUGCCUCUCUUCAUC | 1041 | 229-251 | 377-399 |
| AD-1321262.1 | GAAGAGAGGCAUGUUGGAGAU | 102 | 232-252 | 380-400 | AUCUCCAACAUGCCUCUCUUCAU | 185 | 230-252 | 378-400 |
| AD-1321263.1 | AAGAGAGGCAUGUUGGAGACU | 478 | 233-253 | 381-401 | AGUCTCCAACAUGCCUCUCUUCA | 1042 | 231-253 | 379-401 |
| AD-1321264.1 | AGAGAGGCAUGUUGGAGACUU | 991 | 234-254 | 382-402 | AAGUCUCCAACAUGCCUCUCUUC | 1043 | 232-254 | 380-402 |
| AD-1321265.1 | GAGAGGCAUGUUGGAGACUUU | 992 | 235-255 | 383-403 | AAAGTCTCCAACAUGCCUCUCUU | 1044 | 233-255 | 381-403 |
| AD-1321266.1 | AGAGGCAUGUUGGAGACUUGU | 993 | 236-256 | 384-404 | ACAAGUCUCCAACAUGCCUCUCU | 1045 | 234-256 | 382-404 |
| AD-1321267.1 | GCAGAUGACUUGGGCAAAGGU | 483 | 370-390 | 518-538 | ACCUTUGCCCAAGUCAUCUGCUU | 1046 | 368-390 | 516-538 |
| AD-1321268.1 | CAGAUGACUUGGGCAAAGGUU | 994 | 371-391 | 519-539 | AACCUUUGCCCAAGUCAUCUGCU | 1047 | 369-391 | 517-539 |
| AD-1321269.1 | AGAUGACUUGGGCAAAGGUGU | 484 | 372-392 | 520-540 | ACACCUUUGCCCAAGUCAUCUGC | 563 | 370-392 | 518-540 |
| AD-1321270.1 | GAUGACUUGGGCAAAGGUGGA | 479 | 373-393 | 521-541 | ACCACCUUUGCCCAAGUCAUCUG | 1048 | 371-393 | 519-541 |
| AD-1321271.1 | AUGACUUGGGCAAAGGUGGAA | 450 | 374-394 | 522-542 | UUCCACCUUUGCCCAAGUCAUCU | 529 | 372-394 | 520-542 |
| AD-1321272.1 | UGACUUGGGCAAAGGUGGAAA | 451 | 375-395 | 523-543 | UUUCCACCUUUGCCCAAGUCAUC | 530 | 373-395 | 521-543 |
| AD-1321273.1 | GACUUGGGCAAAGGUGGAAAU | 452 | 376-396 | 524-544 | AUUUCCACCUUUGCCCAAGUCAU | 531 | 374-396 | 522-544 |
| AD-1321274.1 | ACUUGGGCAAAGGUGGAAAUU | 485 | 377-397 | 525-545 | AAUUTCCACCUUUGCCCAAGUCA | 1049 | 375-397 | 523-545 |
| AD-1321275.1 | CUUGGGCAAAGGUGGAAAUGA | 995 | 378-398 | 526-546 | ACAUUUCCACCUUUGCCCAAGUC | 1050 | 376-398 | 524-546 |
| AD-1321276.1 | UUGGGCAAAGGUGGAAAUGAA | 103 | 379-399 | 527-547 | UUCATUTCCACCUUUGCCCAAGU | 1051 | 377-399 | 525-547 |
| AD-1321277.1 | UGGGCAAAGGUGGAAAUGAAU | 996 | 380-400 | 528-548 | AUUCAUTUCCACCUUUGCCCAAG | 1052 | 378-400 | 526-548 |
| AD-1321278.1 | GGGCAAAGGUGGAAAUGAAGA | 997 | 381-401 | 529-549 | ACUUCAUUUCCACCUUUGCCCAA | 1053 | 379-401 | 527-549 |
| AD-1321279.1 | GGCAAAGGUGGAAAUGAAGAA | 998 | 382-402 | 530-550 | UUCUTCAUUUCCACCUUUGCCCA | 1054 | 380-402 | 528-550 |
| AD-1321280.1 | GCAAAGGUGGAAAUGAAGAAA | 999 | 383-403 | 531-551 | UUUCTUCAUUUCCACCUUUGCCC | 1055 | 381-403 | 529-551 |
| AD-1321281.1 | CAAAGGUGGAAAUGAAGAAAU | 1000 | 384-404 | 532-552 | AUUUCUTCAUUUCCACCUUUGCC | 1056 | 382-404 | 530-552 |
| AD-1321282.1 | AAAGGUGGAAAUGAAGAAAGU | 1001 | 385-405 | 533-553 | ACUUTCTUCAUUUCCACCUUUGC | 1057 | 383-405 | 531-553 |
| AD-1321283.1 | AAGGUGGAAAUGAAGAAAGUA | 453 | 386-406 | 534-554 | UACUTUCUUCAUUUCCACCUUUG | 1058 | 384-406 | 532-554 |
| AD-1321284.1 | AGGUGGAAAUGAAGAAAGUAU | 512 | 387-407 | 535-555 | AUACTUTCUUCAUUUCCACCUUU | 1059 | 385-407 | 533-555 |
| AD-1321285.1 | GGUGGAAAUGAAGAAAGUACA | 1002 | 388-408 | 536-556 | AGUACUUUCUUCAUUUCCACCUU | 1060 | 386-408 | 534-556 |
| AD-1321286.1 | GUGGAAAUGAAGAAAGUACAA | 1003 | 389-409 | 537-557 | UUGUACTUUCUUCAUUUCCACCU | 1061 | 387-409 | 535-557 |
| AD-1321287.1 | UGGAAAUGAAGAAAGUACAAA | 1004 | 390-410 | 538-558 | UUUGTACUUUCUUCAUUUCCACC | 1062 | 388-410 | 536-558 |
| AD-1321288.1 | GGAAAUGAAGAAAGUACAAAU | 1005 | 391-411 | 539-559 | AUUUGUACUUUCUUCAUUUCCAC | 1063 | 389-411 | 537-559 |
| AD-1321289.1 | GAAAUGAAGAAAGUACAAAGA | 1006 | 392-412 | 540-560 | UCUUTGTACUUUCUUCAUUUCCA | 1064 | 390-412 | 538-560 |
| AD-1321290.1 | AAAUGAAGAAAGUACAAAGAU | 1007 | 393-413 | 541-561 | AUCUTUGUACUUUCUUCAUUUCC | 1065 | 391-413 | 539-561 |
| AD-1321291.1 | AAUGAAGAAAGUACAAAGACA | 1008 | 394-414 | 542-562 | UGUCTUTGUACUUUCUUCAUUUC | 1066 | 392-414 | 540-562 |

TABLE 13
Modified Sense and Antisense Strand Sequences of Superoxide Dismutase 1 dsRNA Agents

| Duplex | | SEQ ID | | SEQ ID | | SEQ ID |
|---|---|---|---|---|---|---|
| Name | Sense Sequence 5′ to 3′ | NO: | Antisense Sequence 5′ to 3′ | NO: | mRNA target sequence | NO: |
| AD-1321202.1 | uscsauc(Ahd)AfuUfUfCfgagcagaaguL96 | 1067 | asCfsuudCu(G2p)cucgaaAfuUfgaugasusg | 1157 | CACCAUCAAUUUCGAGCAGAAGG | 1247 |
| AD-1321203.1 | csasuca(Ahd)UfuUfCfGfagcagaaggaL96 | 1068 | asCfscuuCfugcucgaAfaUfugaugsasu | 1158 | ACCAUCAAUUUCGAGCAGAAGGA | 1248 |
| AD-1321204.1 | asuscaa(Uhd)UfuCfGfAfgcagaaggaaL96 | 1069 | usUfsccdTu(C2p)ugcucgAfaAfuugausgsa | 1159 | CCAUCAAUUUCGAGCAGAAGGAA | 395 |
| AD-1321205.1 | uscsaau(Uhd)UfcGfAfGfcagaaggaaaL96 | 1070 | usUfsucdCu(Tgn)cugcucGfaAfauugasusg | 1160 | CAUCAAUUUCGAGCAGAAGGAAA | 436 |
| AD-1321206.1 | csasauu(Uhd)CfgAfGfCfagaaggaaauL96 | 1071 | asUfsuudCc(Tgn)ucugcuCfgAfaauugsasu | 1161 | AUCAAUUUCGAGCAGAAGGAAAG | 416 |
| AD-1321207.1 | asasuuu(Chd)GfaGfCfAfgaaggaaaguL96 | 1072 | asCfsuudTc(C2p)uucugcUfcGfaaauusgsa | 1162 | UCAAUUUCGAGCAGAAGGAAAGU | 770 |
| AD-1321208.1 | asusuuc(Ghd) AfgCfAfGfaaggaaaguaL96 | 1073 | usAfscudTu(C2p)cuucugCfuCfgaaaususg | 1163 | CAAUUUCGAGCAGAAGGAAAGUA | 379 |
| AD-1321209.1 | ususucg(Ahd)GfcAfGfAfaggaaaguaaL96 | 1074 | usUfsacdTu(Tgn)ccuucuGfcUfcgaaasusu | 1164 | AAUUUCGAGCAGAAGGAAAGUAA | 421 |
| AD-1321210.1 | ususcga(Ghd)CfaGfAfAfggaaaguaauL96 | 1075 | asUfsuadCu(Tgn)uccuucUfgCfucgaasasu | 1165 | AUUUCGAGCAGAAGGAAAGUAAU | 378 |
| AD-1321211.1 | uscsgag(Chd)AfgAfAfGfgaaaguaauuL96 | 1076 | asAfsuudAc(Tgn)uuccuuCfuGfcucgasasa | 1166 | UUUCGAGCAGAAGGAAAGUAAUG | 413 |
| AD-1321212.1 | csgsagc(Ahd)GfaAfGfGfaaaguaauguL96 | 1077 | asCfsauuAfcuuuccuUfcUfgcucgsasa | 1167 | UUCGAGCAGAAGGAAAGUAAUGG | 405 |
| AD-1321213.1 | gsasgca(Ghd)AfaGfGfAfaaguaauggaL96 | 1078 | asCfscauUfacuuuccUfuCfugcucsgsa | 1168 | UCGAGCAGAAGGAAAGUAAUGGA | 771 |
| AD-1321214.1 | asgscag(Ahd)AfgGfAfAfaguaauggauL96 | 1079 | asUfsccaUfuacuuucCfuUfcugcuscsg | 1169 | CGAGCAGAAGGAAAGUAAUGGAC | 1249 |
| AD-1321215.1 | gscsaga(Ahd)GfgAfAfAfguaauggacuL96 | 1080 | asGfsucdCa(Tgn)uacuuuCfcUfucugcsusc | 1170 | GAGCAGAAGGAAAGUAAUGGACC | 1250 |
| AD-1321216.1 | csasgaa(Ghd)GfaAfAfGfuaauggaccaL96 | 1081 | usGfsgudCc(Agn)uuacuuUfcCfuucugscsu | 1171 | AGCAGAAGGAAAGUAAUGGACCA | 415 |
| AD-1321217.1 | asgsaag(Ghd)AfaAfGfUfaauggaccauL96 | 1082 | asUfsggdTc(C2p)auuacuUfuCfcuucusgsc | 1172 | GCAGAAGGAAAGUAAUGGACCAG | 772 |
| AD-1321218.1 | gsasagg(Ahd)AfaGfUfAfauggaccaguL96 | 1083 | asCfsugdGu(C2p)cauuacUfuUfccuucsusg | 1173 | CAGAAGGAAAGUAAUGGACCAGU | 773 |
| AD-1321219.1 | asasgga(Ahd)AfgUfAfAfuggaccaguuL96 | 1084 | asAfscudGg(Tgn)ccauuaCfuUfuccuuscsu | 1174 | AGAAGGAAAGUAAUGGACCAGUG | 417 |
| AD-1321220.1 | asgsgaa(Ahd)GfuAfAfUfggaccagugaL96 | 1085 | usCfsacdTg(G2p)uccauuAfcUfuuccususc | 1175 | GAAGGAAAGUAAUGGACCAGUGA | 774 |
| AD-1321221.1 | gsgsaaa(Ghd)UfaAfUfGfgaccagugaaL96 | 1086 | usUfscadCu(G2p)guccauUfaCfuuuccsusu | 1176 | AAGGAAAGUAAUGGACCAGUGAA | 775 |
| AD-1321222.1 | gsasaag(Uhd)AfaUfGfGfaccagugaauL96 | 1087 | asUfsucdAc(Tgn)gguccaUfuAfcuuucscsu | 1177 | AGGAAAGUAAUGGACCAGUGAAG | 776 |
| AD-1321223.1 | asasagu(Ahd)AfuGfGfAfccagugaaguL96 | 1088 | asCfsuucAfcugguccAfuUfacuuuscsc | 1178 | GGAAAGUAAUGGACCAGUGAAGG | 777 |
| AD-1321224.1 | asasgua(Ahd)UfgGfAfCfcagugaagguL96 | 1089 | asCfscuuCfacuggucCfaUfuacuususc | 1179 | GAAAGUAAUGGACCAGUGAAGGU | 778 |
| AD-1321225.1 | asgsuaa(Uhd)GfgAfCfCfagugaagguuL96 | 1090 | asAfsccdTu(C2p)acugguCfcAfuuacususu | 1180 | AAAGUAAUGGACCAGUGAAGGUG | 779 |
| AD-1321226.1 | gsusaau(Ghd)GfaCfCfAfgugaagguguL96 | 1091 | asCfsaccUfucacuggUfcCfauuacsusu | 1181 | AAGUAAUGGACCAGUGAAGGUGU | 1251 |
| AD-1321227.1 | usasaug(Ghd)AfcCfAfGfugaagguguuL96 | 1092 | asAfscacCfuucacugGfuCfcauuascsu | 1182 | AGUAAUGGACCAGUGAAGGUGUG | 425 |
| AD-1321228.1 | asasugg(Ahd)CfcAfGfUfgaagguguguL96 | 1093 | asCfsacaCfcuucacuGfgUfccauusasc | 1183 | GUAAUGGACCAGUGAAGGUGUGG | 1252 |
| AD-1321229.1 | gsusacc(Ahd)GfuGfCfAfgguccucacuL96 | 1094 | asGfsugdAg(G2p)accugcAfcUfgguacsasg | 1184 | CUGUACCAGUGCAGGUCCUCACU | 1253 |
| AD-1321230.1 | usascca(Ghd)UfgCfAfGfguccucacuuL96 | 1095 | asAfsgudGa(G2p)gaccugCfaCfugguascsa | 1185 | UGUACCAGUGCAGGUCCUCACUU | 1254 |
| AD-1321231.1 | ascscag(Uhd)GfcAfGfGfuccucacuuuL96 | 1096 | as AfsagdTg(Agn)ggaccuGfcAfcuggusasc | 1186 | GUACCAGUGCAGGUCCUCACUUU | 375 |
| AD-1321232.1 | cscsagu(Ghd)CfaGfGfUfccucacuuuaL96 | 1097 | usAfsaadGu(G2p)aggaccUfgCfacuggsusa | 1187 | UACCAGUGCAGGUCCUCACUUUA | 407 |
| AD-1321233.1 | csasgug(Chd)AfgGfUfCfcucacuuuaaL96 | 1098 | usUfsaadAg(Tgn)gaggacCfuGfcacugsgsu | 1188 | ACCAGUGCAGGUCCUCACUUUAA | 386 |
| AD-1321234.1 | asgsugc(Ahd)GfgUfCfCfucacuuuaauL96 | 1099 | asUfsuadAa(G2p)ugaggaCfcUfgcacusgsg | 1189 | CCAGUGCAGGUCCUCACUUUAAU | 418 |
| AD-1321235.1 | gsusgca(Ghd)GfuCfCfUfcacuuuaauuL96 | 1100 | asAfsuuaAfagugaggAfcCfugcacsusg | 1190 | CAGUGCAGGUCCUCACUUUAAUC | 424 |
| AD-1321236.1 | usgscag(Ghd)UfcCfUfCfacuuuaaucuL96 | 1101 | asGfsauuAfaagugagGfaCfcugcascsu | 1191 | AGUGCAGGUCCUCACUUUAAUCC | 371 |
| AD-1321237.1 | gscsagg(Uhd)CfcUfCfAfcuuuaauccuL96 | 1102 | asGfsgauUfaaagugaGfgAfccugcsasc | 1192 | GUGCAGGUCCUCACUUUAAUCCU | 429 |
| AD-1321238.1 | csasggu(Chd)CfuCfAfCfuuuaauccuuL96 | 1103 | asAfsggaUfuaaagugAfgGfaccugscsa | 1193 | UGCAGGUCCUCACUUUAAUCCUC | 373 |
| AD-1321239.1 | asgsguc(Chd)UfcAfCfUfuuaauccucuL96 | 1104 | asGfsaggAfuuaaaguGfaGfgaccusgsc | 1194 | GCAGGUCCUCACUUUAAUCCUCU | 408 |
| AD-1321240.1 | gsgsucc(Uhd)CfaCfUfUfuaauccucuaL96 | 1105 | usAfsgadGg(Agn)uuaaagUfgAfggaccsusg | 1195 | CAGGUCCUCACUUUAAUCCUCUA | 385 |
| AD-1321241.1 | gsusccu(Chd)AfcUfUfUfaauccucuauL96 | 1106 | asUfsagdAg(G2p)auuaaaGfuGfaggacscsu | 1196 | AGGUCCUCACUUUAAUCCUCUAU | 397 |
| AD-1321242.1 | uscscuc(Ahd)CfuUfUfAfauccucuauuL96 | 1107 | asAfsuadGa(G2p)gauuaaAfgUfgaggascsc | 1197 | GGUCCUCACUUUAAUCCUCUAUC | 396 |
| AD-1321243.1 | cscsuca(Chd)UfuUfAfAfuccucuaucuL96 | 1108 | asGfsaudAg(Agn)ggauuaAfaGfugaggsasc | 1198 | GUCCUCACUUUAAUCCUCUAUCC | 374 |
| AD-1321244.1 | csuscac(Uhd)UfuAfAfUfccucuauccaL96 | 1109 | asGfsgauAfgaggauuAfaAfgugagsgsa | 1199 | UCCUCACUUUAAUCCUCUAUCCA | 382 |
| AD-1321245.1 | uscsacu(Uhd)UfaAfUfCfcucuauccauL96 | 1110 | asUfsggaUfagaggauUfaAfagugasgsg | 1200 | CCUCACUUUAAUCCUCUAUCCAG | 414 |
| AD-1321246.1 | csascuu(Uhd)AfaUfCfCfucuauccagaL96 | 1111 | asCfsuggAfuagaggaUfuAfaagugsasg | 1201 | CUCACUUUAAUCCUCUAUCCAGA | 403 |
| AD-1321247.1 | ascsuuu(Ahd)AfuCfCfUfcuauccagaaL96 | 1112 | usUfscudGg(Agn)uagaggAfuUfaaagusgsa | 1202 | UCACUUUAAUCCUCUAUCCAGAC | 393 |
| AD-1321248.1 | gsusggg(Chd)CfaAfAfGfgaugaagagaL96 | 1113 | usCfsucdTu(C2p)auccuuUfgGfcccacscsg | 1203 | CGGUGGGCCAAAGGAUGAAGAGA | 1255 |
| AD-1321249.1 | usgsggc(Chd)AfaAfGfGfaugaagagauL96 | 1114 | asUfscudCu(Tgn)cauccuUfuGfgcccascsc | 1204 | GGUGGGCCAAAGGAUGAAGAGAG | 1256 |
| AD-1321250.1 | gsgsgcc(Ahd)AfaGfGfAfugaagagaguL96 | 1115 | asCfsucdTc(Tgn)ucauccUfuUfggcccsasc | 1205 | GUGGGCCAAAGGAUGAAGAGAGG | 1257 |
| AD-1321251.1 | gsgscca(Ahd)AfgGfAfUfgaagagagguL96 | 1116 | asCfscudCu(C2p)uucaucCfuUfuggccscsa | 1206 | UGGGCCAAAGGAUGAAGAGAGGC | 1258 |
| AD-1321252.1 | gscscaa(Ahd)GfgAfUfGfaagagaggcaL96 | 1117 | usGfsccdTc(Tgn)cuucauCfcUfuuggcscsc | 1207 | GGGCCAAAGGAUGAAGAGAGGCA | 1259 |
| AD-1321253.1 | cscsaaa(Ghd)GfaUfGfAfagagaggcauL96 | 1118 | asUfsgcdCu(C2p)ucuucaUfcCfuuuggscsc | 1208 | GGCCAAAGGAUGAAGAGAGGCAU | 1260 |
| AD-1321254.1 | csasaag(Ghd) AfuGfAfAfgagaggcauuL96 | 1119 | asAfsugdCc(Tgn)cucuucAfuCfcuuugsgsc | 1209 | GCCAAAGGAUGAAGAGAGGCAUG | 789 |
| AD-1321255.1 | asasagg(Ahd)UfgAfAfGfagaggcauguL96 | 1120 | asCfsaudGc(C2p)ucucuuCfaUfccuuusgsg | 1210 | CCAAAGGAUGAAGAGAGGCAUGU | 1261 |
| AD-1321256.1 | asasgga(Uhd)GfaAfGfAfgaggcauguuL96 | 1121 | asAfscadTg(C2p)cucucuUfcAfuccuususg | 1211 | CAAAGGAUGAAGAGAGGCAUGUU | 790 |
| AD-1321257.1 | asgsgau(Ghd)AfaGfAfGfaggcauguuuL96 | 1122 | asAfsacdAu(G2p)ccucucUfuCfauccususu | 1212 | AAAGGAUGAAGAGAGGCAUGUUG | 791 |
| AD-1321258.1 | gsgsaug(Ahd)AfgAfGfAfggcauguuguL96 | 1123 | asCfsaacAfugccucuCfuUfcauccsusu | 1213 | AAGGAUGAAGAGAGGCAUGUUGG | 792 |
| AD-1321259.1 | gsasuga(Ahd)GfaGfAfGfgcauguuggaL96 | 1124 | asCfscaaCfaugccucUfcUfucaucscsu | 1214 | AGGAUGAAGAGAGGCAUGUUGGA | 788 |
| AD-1321260.1 | asusgaa(Ghd)AfgAfGfGfcauguuggauL96 | 1125 | asUfsccaAfcaugccuCfuCfuucauscsc | 1215 | GGAUGAAGAGAGGCAUGUUGGAG | 793 |
| AD-1321261.1 | usgsaag(Ahd)GfaGfGfCfauguuggagaL96 | 1126 | asCfsuccAfacaugccUfcUfcuucasusc | 1216 | GAUGAAGAGAGGCAUGUUGGAGA | 1262 |
| AD-1321262.1 | gsasaga(Ghd)AfgGfCfAfuguuggagauL96 | 1127 | asUfscucCfaacaugcCfuCfucuucsasu | 1217 | AUGAAGAGAGGCAUGUUGGAGAC | 434 |
| AD-1321263.1 | asasgag(Ahd)GfgCfAfUfguuggagacuL96 | 1128 | asGfsucdTc(C2p)aacaugCfcUfcucuuscsa | 1218 | UGAAGAGAGGCAUGUUGGAGACC | 794 |
| AD-1321264.1 | asgsaga(Ghd)GfcAfUfGfuuggagacuuL96 | 1129 | asAfsgudCu(C2p)caacauGfcCfucucususc | 1219 | GAAGAGAGGCAUGUUGGAGACCU | 1263 |
| AD-1321265.1 | gsasgag(Ghd)CfaUfGfUfuggagacuuuL96 | 1130 | asAfsagdTc(Tgn)ccaacaUfgCfcucucsusu | 1220 | AAGAGAGGCAUGUUGGAGACCUG | 439 |
| AD-1321266.1 | asgsagg(Chd)AfuGfUfUfggagacuuguL96 | 1131 | asCfsaadGu(C2p)uccaacAfuGfccucuscsu | 1221 | AGAGAGGCAUGUUGGAGACCUGG | 1264 |
| AD-1321267.1 | gscsaga(Uhd)GfaCfUfUfgggcaaagguL96 | 1132 | asCfscudTu(G2p)cccaagUfcAfucugcsusu | 1222 | AAGCAGAUGACUUGGGCAAAGGU | 799 |
| AD-1321268.1 | csasgau(Ghd)AfcUfUfGfggcaaagguuL96 | 1133 | asAfsccuUfugcccaaGfuCfaucugscsu | 1223 | AGCAGAUGACUUGGGCAAAGGUG | 1265 |
| AD-1321269.1 | asgsaug(Ahd)CfuUfGfGfgcaaagguguL96 | 1134 | asCfsaccUfuugcccaAfgUfcaucusgsc | 1224 | GCAGAUGACUUGGGCAAAGGUGG | 800 |
| AD-1321270.1 | gsasuga(Chd)UfuGfGfGfcaaagguggaL96 | 1135 | asCfscacCfuuugcccAfaGfucaucsusg | 1225 | CAGAUGACUUGGGCAAAGGUGGA | 795 |
| AD-1321271.1 | asusgac(Uhd)UfgGfGfCfaaagguggaaL96 | 1136 | usUfsccdAc(C2p)uuugccCfaAfgucauscsu | 1226 | AGAUGACUUGGGCAAAGGUGGAA | 766 |
| AD-1321272.1 | usgsacu(Uhd)GfgGfCfAfaagguggaaaL96 | 1137 | usUfsucdCa(C2p)cuuugcCfcAfagucasusc | 1227 | GAUGACUUGGGCAAAGGUGGAAA | 767 |
| AD-1321273.1 | gsascuu(Ghd)GfgCfAfAfagguggaaauL96 | 1138 | asUfsuudCc(Agn)ccuuugCfcCfaagucsasu | 1228 | AUGACUUGGGCAAAGGUGGAAAU | 768 |
| AD-1321274.1 | ascsuug(Ghd)GfcAfAfAfgguggaaauuL96 | 1139 | asAfsuudTc(C2p)accuuuGfcCfcaaguscsa | 1229 | UGACUUGGGCAAAGGUGGAAAUG | 801 |
| AD-1321275.1 | csusugg(Ghd)CfaAfAfGfguggaaaugaL96 | 1140 | asCfsauuUfccaccuuUfgCfccaagsusc | 1230 | GACUUGGGCAAAGGUGGAAAUGA | 1266 |
| AD-1321276.1 | ususggg(Chd)AfaAfGfGfuggaaaugaaL96 | 1141 | usUfscadTu(Tgn)ccaccuUfuGfcccaasgsu | 1231 | ACUUGGGCAAAGGUGGAAAUGAA | 435 |
| AD-1321277.1 | usgsggc(Ahd)AfaGfGfUfggaaaugaauL96 | 1142 | asUfsucdAu(Tgn)uccaccUfuUfgcccasasg | 1232 | CUUGGGCAAAGGUGGAAAUGAAG | 1267 |
| AD-1321278.1 | gsgsgca(Ahd)AfgGfUfGfgaaaugaagaL96 | 1143 | asCfsuucAfuuuccacCfuUfugcccsasa | 1233 | UUGGGCAAAGGUGGAAAUGAAGA | 1268 |
| AD-1321279.1 | gsgscaa(Ahd)GfgUfGfGfaaaugaagaaL96 | 1144 | usUfscudTc(Agn)uuuccaCfcUfuugccscsa | 1234 | UGGGCAAAGGUGGAAAUGAAGAA | 1269 |
| AD-1321280.1 | gscsaaa(Ghd)GfuGfGfAfaaugaagaaaL96 | 1145 | usUfsucdTu(C2p)auuuccAfcCfuuugcscsc | 1235 | GGGCAAAGGUGGAAAUGAAGAAA | 1270 |
| AD-1321281.1 | csasaag(Ghd)UfgGfAfAfaugaagaaauL96 | 1146 | asUfsuudCu(Tgn)cauuucCfaCfcuuugscsc | 1236 | GGCAAAGGUGGAAAUGAAGAAAG | 1271 |
| AD-1321282.1 | asasagg(Uhd)GfgAfAfAfugaagaaaguL96 | 1147 | asCfsuudTc(Tgn)ucauuuCfcAfccuuusgsc | 1237 | GCAAAGGUGGAAAUGAAGAAAGU | 1272 |
| AD-1321283.1 | asasggu(Ghd)GfaAfAfUfgaagaaaguaL96 | 1148 | usAfscudTu(C2p)uucauuUfcCfaccuususg | 1238 | CAAAGGUGGAAAUGAAGAAAGUA | 769 |
| AD-1321284.1 | asgsgug(Ghd)AfaAfUfGfaagaaaguauL96 | 1149 | asUfsacdTu(Tgn)cuucauUfuCfcaccususu | 1239 | AAAGGUGGAAAUGAAGAAAGUAA | 1273 |
| AD-1321285.1 | gsgsugg(Ahd)AfaUfGfAfagaaaguacaL96 | 1150 | asGfsuacUfuucuucaUfuUfccaccsusu | 1240 | AAGGUGGAAAUGAAGAAAGUAAA | 446 |
| AD-1321286.1 | gsusgga(Ahd)AfuGfAfAfgaaaguacaaL96 | 1151 | usUfsgudAc(Tgn)uucuucAfuUfuccacscsu | 1241 | AGGUGGAAAUGAAGAAAGUAAAA | 1274 |
| AD-1321287.1 | usgsgaa(Ahd)UfgAfAfGfaaaguacaaaL96 | 1152 | usUfsugdTa(C2p)uuucuuCfaUfuuccascsc | 1242 | GGUGGAAAUGAAGAAAGUAAAAA | 1275 |
| AD-1321288.1 | gsgsaaa(Uhd)GfaAfGfAfaaguacaaauL96 | 1153 | asUfsuudGu(Agn)cuuucuUfcAfuuuccsasc | 1243 | GUGGAAAUGAAGAAAGUAAAAAG | 1276 |
| AD-1321289.1 | gsasaau(Ghd)AfaGfAfAfaguacaaagaL96 | 1154 | usCfsuudTg(Tgn)acuuucUfuCfauuucscsa | 1244 | UGGAAAUGAAGAAAGUAAAAAGA | 1277 |
| AD-1321290.1 | asasaug(Ahd)AfgAfAfAfguacaaagauL96 | 1155 | asUfscudTu(G2p)uacuuuCfuUfcauuuscsc | 1245 | GGAAAUGAAGAAAGUAAAAAGAC | 1278 |
| AD-1321291.1 | asasuga(Ahd)GfaAfAfGfuacaaagacaL96 | 1156 | usGfsucdTu(Tgn)guacuuUfcUfucauususc | 1246 | GAAAUGAAGAAAGUAAAAAGACA | 1279 |

TABLE 14
Superoxide Dismutase 1 In Vitro Single Dose Screens
in Primary Cynomolgus Hepatocytes (PCH) cells

| | 50 mM | | 10 nM | | 1 nM | | 0.1 nM | |
|---|---|---|---|---|---|---|---|---|
| Duplex | Avg | SD | Avg | SD | Avg | SD | Avg | SD |
| AD-1321202.1 | 40.5 | 4.8 | 38.0 | 4.1 | 63.0 | 6.8 | 91.8 | 3.6 |
| AD-1321203.1 | 24.5 | 1.5 | 29.0 | 2.0 | 72.8 | 5.4 | 89.5 | 2.7 |
| AD-1321204.1 | 27.2 | 1.1 | 20.2 | 1.5 | 31.5 | 2.3 | 70.9 | 2.6 |
| AD-1321205.1 | 96.4 | 5.1 | 86.7 | 2.0 | 95.3 | 4.9 | 97.3 | 2.3 |
| AD-1321206.1 | 21.5 | 1.2 | 20.7 | 1.7 | 37.6 | 4.2 | 69.5 | 2.8 |
| AD-1321207.1 | 9.2 | 1.1 | 9.9 | 1.3 | 22.9 | 3.7 | 53.7 | 4.1 |
| AD-1321208.1 | 41.0 | 4.8 | 27.7 | 1.0 | 49.9 | 2.4 | 81.8 | 2.0 |
| AD-1321209.1 | 66.0 | 1.8 | 55.7 | 4.0 | 67.5 | 3.4 | 90.3 | 2.0 |
| AD-1321210.1 | 6.9 | 1.1 | 8.0 | 1.3 | 13.9 | 2.8 | 34.8 | 3.6 |
| AD-1321211.1 | 101.9 | 4.3 | 99.1 | 1.6 | 88.3 | 3.4 | 100.2 | 3.5 |
| AD-1321212.1 | 21.7 | 2.3 | 25.4 | 2.1 | 57.8 | 5.9 | 88.7 | 4.3 |
| AD-1321213.1 | 31.1 | 3.1 | 29.0 | 2.4 | 60.6 | 6.6 | 93.2 | 3.2 |
| AD-1321214.1 | 76.6 | 8.9 | 75.7 | 9.1 | 93.7 | 8.1 | 98.0 | 3.3 |
| AD-1321215.1 | 30.3 | 2.9 | 35.0 | 4.4 | 83.2 | 10.4 | 94.5 | 4.6 |
| AD-1321216.1 | 17.7 | 4.0 | 13.5 | 3.1 | 31.1 | 5.0 | 64.7 | 3.3 |
| AD-1321217.1 | 47.9 | 5.0 | 35.5 | 4.3 | 54.9 | 5.9 | 80.8 | 6.2 |
| AD-1321218.1 | 28.6 | 4.0 | 37.5 | 7.0 | 58.3 | 5.2 | 81.4 | 6.1 |
| AD-1321219.1 | 7.5 | 0.6 | 10.4 | 1.2 | 26.2 | 4.8 | 60.8 | 4.2 |
| AD-1321220.1 | 9.0 | 1.6 | 10.3 | 0.5 | 29.8 | 3.1 | 68.7 | 2.5 |
| AD-1321221.1 | 26.6 | 1.2 | 28.8 | 3.9 | 53.6 | 5.1 | 90.8 | 2.4 |
| AD-1321222.1 | 18.2 | 2.2 | 17.4 | 1.3 | 39.9 | 1.5 | 78.6 | 5.8 |
| AD-1321223.1 | 92.2 | 10.4 | 72.0 | 9.8 | 99.8 | 4.6 | 108.7 | 11.5 |
| AD-1321224.1 | 91.7 | 5.5 | 85.1 | 6.0 | 110.4 | 12.0 | 102.3 | 4.3 |
| AD-1321225.1 | 30.7 | 3.9 | 41.7 | 4.1 | 72.7 | 10.8 | 91.4 | 2.2 |
| AD-1321226.1 | 49.0 | 6.3 | 65.4 | 6.1 | 86.6 | 6.6 | 100.4 | 7.4 |
| AD-1321227.1 | 64.6 | 6.7 | 63.0 | 6.7 | 83.2 | 6.5 | 99.1 | 5.1 |
| AD-1321228.1 | 89.9 | 6.7 | 88.4 | 2.5 | 100.9 | 8.3 | 102.7 | 7.6 |
| AD-1321229.1 | 62.5 | 8.6 | 61.1 | 3.3 | 78.3 | 4.9 | 83.2 | 32.2 |
| AD-1321230.1 | 77.5 | 7.3 | 73.6 | 2.1 | 88.6 | 9.5 | 102.8 | 7.0 |
| AD-1321231.1 | 17.0 | 2.6 | 21.8 | 5.1 | 48.1 | 3.5 | 80.0 | 4.1 |
| AD-1321232.1 | 67.1 | 1.9 | 52.0 | 2.4 | 46.8 | 8.7 | 72.2 | 5.8 |
| AD-1321233.1 | 99.8 | 8.2 | 104.4 | 10.3 | 99.7 | 6.0 | 102.4 | 4.9 |
| AD-1321234.1 | 74.6 | 6.3 | 69.0 | 8.1 | 87.3 | 7.7 | 96.9 | 5.3 |
| AD-1321235.1 | 65.4 | 2.3 | 52.6 | 5.3 | 68.4 | 9.4 | 87.1 | 2.7 |
| AD-1321236.1 | 63.7 | 3.4 | 60.8 | 1.3 | 87.6 | 2.1 | 98.6 | 5.9 |
| AD-1321237.1 | 42.5 | 1.3 | 54.2 | 1.5 | 96.8 | 4.1 | 104.7 | 5.7 |
| AD-1321238.1 | 22.3 | 2.3 | 23.3 | 3.0 | 45.5 | 6.4 | 73.5 | 2.8 |
| AD-1321239.1 | 66.4 | 5.6 | 50.9 | 3.4 | 76.6 | 9.0 | 98.3 | 6.7 |
| AD-1321240.1 | 98.9 | 1.4 | 100.6 | 9.7 | 104.9 | 10.4 | 102.5 | 2.4 |
| AD-1321241.1 | 95.2 | 8.9 | 89.6 | 10.7 | 101.7 | 13.1 | 101.7 | 5.1 |
| AD-1321242.1 | 17.0 | 1.9 | 19.2 | 1.9 | 43.0 | 4.9 | 78.7 | 1.6 |
| AD-1321243.1 | 8.7 | 1.7 | 10.0 | 1.2 | 32.6 | 3.3 | 66.3 | 2.9 |
| AD-1321244.1 | 43.9 | 2.8 | 34.4 | 2.3 | 73.8 | 9.5 | 93.0 | 4.1 |
| AD-1321245.1 | 25.1 | 0.6 | 26.0 | 1.8 | 61.0 | 5.8 | 90.3 | 6.7 |
| AD-1321246.1 | 6.4 | 1.7 | 6.8 | 1.0 | 20.9 | 2.8 | 51.3 | 6.9 |
| AD-1321247.1 | 86.5 | 5.8 | 80.7 | 6.6 | 85.3 | 4.2 | 92.1 | 4.9 |
| AD-1321248.1 | 98.5 | 6.9 | 99.9 | 11.4 | 102.8 | 7.5 | 105.8 | 6.3 |
| AD-1321249.1 | 63.4 | 3.0 | 69.2 | 6.0 | 92.7 | 3.5 | 104.5 | 3.9 |
| AD-1321250.1 | 40.2 | 1.8 | 56.5 | 1.8 | 96.8 | 5.2 | 100.7 | 0.6 |
| AD-1321251.1 | 98.2 | 3.8 | 97.2 | 12.0 | 107.0 | 13.0 | 103.6 | 5.1 |
| AD-1321252.1 | 71.0 | 2.3 | 63.8 | 7.5 | 94.0 | 5.3 | 100.8 | 5.6 |
| AD-1321253.1 | 7.8 | 0.6 | 11.3 | 0.8 | 36.6 | 10.7 | 75.2 | 9.7 |
| AD-1321254.1 | 36.8 | 3.1 | 27.4 | 2.0 | 47.4 | 7.6 | 78.6 | 5.1 |
| AD-1321255.1 | 73.6 | 5.5 | 61.4 | 6.5 | 76.2 | 11.1 | 92.4 | 4.9 |
| AD-1321256.1 | 8.3 | 0.6 | 8.5 | 0.7 | 20.3 | 4.4 | 49.8 | 5.2 |
| AD-1321257.1 | 7.4 | 0.4 | 9.8 | 2.3 | 21.9 | 2.5 | 51.1 | 0.8 |
| AD-1321258.1 | 16.8 | 1.2 | 29.4 | 2.8 | 81.9 | 8.3 | 107.0 | 2.1 |
| AD-1321259.1 | 19.2 | 1.7 | 21.9 | 1.9 | 65.6 | 6.8 | 94.0 | 4.1 |
| AD-1321260.1 | 49.6 | 2.6 | 53.9 | 3.5 | 86.8 | 7.6 | 101.9 | 1.1 |
| AD-1321261.1 | 19.6 | 1.6 | 28.2 | 2.7 | 75.7 | 3.0 | 102.2 | 9.2 |
| AD-1321262.1 | 52.5 | 1.7 | 56.4 | 2.3 | 91.1 | 10.7 | 105.8 | 8.3 |
| AD-1321263.1 | 86.3 | 3.5 | 95.2 | 11.5 | 101.5 | 9.8 | 95.9 | 10.7 |
| AD-1321264.1 | 92.0 | 7.4 | 91.8 | 8.7 | 93.9 | 7.1 | 103.0 | 8.1 |
| AD-1321265.1 | 58.9 | 4.1 | 62.3 | 5.0 | 78.3 | 5.6 | 92.2 | 3.5 |
| AD-1321266.1 | 89.0 | 3.7 | 94.2 | 8.4 | 103.9 | 9.2 | 100.4 | 10.1 |
| AD-1321267.1 | 24.6 | 3.2 | 36.0 | 7.6 | 84.3 | 5.2 | 95.7 | 5.9 |
| AD-1321268.1 | 98.4 | 3.4 | 91.4 | 9.5 | 107.5 | 11.1 | 101.4 | 9.1 |
| AD-1321269.1 | 61.0 | 2.1 | 63.7 | 1.4 | 97.1 | 7.2 | 99.4 | 4.5 |
| AD-1321270.1 | 65.6 | 2.1 | 68.9 | 11.4 | 92.6 | 12.7 | 99.2 | 8.1 |
| AD-1321271.1 | 94.0 | 7.5 | 96.9 | 10.1 | 108.1 | 15.0 | 110.0 | 13.5 |
| AD-1321272.1 | 92.4 | 6.7 | 94.4 | 11.3 | 98.8 | 10.7 | 106.2 | 12.6 |
| AD-1321273.1 | 19.8 | 2.0 | 23.0 | 3.3 | 49.5 | 9.4 | 77.4 | 2.4 |
| AD-1321274.1 | 100.5 | 9.1 | 83.5 | 9.3 | 104.1 | 5.4 | 99.3 | 13.4 |
| AD-1321275.1 | 76.2 | 6.5 | 61.2 | 3.0 | 91.6 | 5.8 | 94.6 | 8.6 |
| AD-1321276.1 | 11.8 | 0.8 | 10.6 | 1.8 | 23.5 | 2.9 | 50.9 | 3.1 |
| AD-1321277.1 | 62.2 | 2.8 | 61.1 | 6.1 | 81.0 | 7.6 | 91.3 | 4.4 |
| AD-1321278.1 | 89.1 | 6.7 | 88.1 | 5.7 | 101.9 | 2.0 | 101.9 | 6.0 |
| AD-1321279.1 | 79.5 | 3.1 | 66.2 | 5.0 | 82.8 | 3.9 | 95.9 | 8.6 |
| AD-1321280.1 | 33.9 | 5.1 | 18.0 | 1.8 | 26.5 | 2.6 | 54.9 | 11.6 |
| AD-1321281.1 | 67.6 | 5.5 | 52.4 | 6.2 | 85.3 | 6.8 | 98.1 | 9.4 |
| AD-1321282.1 | 10.4 | 0.6 | 12.4 | 2.3 | 58.9 | 16.7 | 83.3 | 6.3 |
| AD-1321283.1 | 11.7 | 1.6 | 9.6 | 0.9 | 28.2 | 3.2 | 57.7 | 7.8 |
| AD-1321284.1 | 32.8 | 2.1 | 19.9 | 2.7 | 29.1 | 2.8 | 64.2 | 4.8 |
| AD-1321285.1 | 13.4 | 0.8 | 14.1 | 1.1 | 36.8 | 2.6 | 76.3 | 5.5 |
| AD-1321286.1 | 81.8 | 3.8 | 70.8 | 5.8 | 82.1 | 4.0 | 95.5 | 4.6 |
| AD-1321287.1 | 83.5 | 5.0 | 68.8 | 3.4 | 80.6 | 4.4 | 94.8 | 0.6 |
| AD-1321288.1 | 33.5 | 2.7 | 30.3 | 2.3 | 54.3 | 2.4 | 89.9 | 3.1 |
| AD-1321289.1 | 84.7 | 7.1 | 70.2 | 4.8 | 90.5 | 4.9 | 98.6 | 2.0 |
| AD-1321290.1 | 25.7 | 1.3 | 22.2 | 1.2 | 45.2 | 3.4 | 77.9 | 2.1 |
| AD-1321291.1 | 92.9 | 3.9 | 80.9 | 1.8 | 93.8 | 3.7 | 101.7 | 5.2 |

TABLE 15
Superoxide Dismutase 1 In Vitro Single
Dose Screens in BE(2)C cells

| | 50 mM | | 10 nM | | 1 mM | | 0.1 nM | |
|---|---|---|---|---|---|---|---|---|
| Duplex | Avg | SD | Avg | SD | Avg | SD | Avg | SD |
| AD-1321202.1 | 21.9 | 2.6 | 25.0 | 1.5 | 69.4 | 11.3 | 77.1 | 6.1 |
| AD-1321203.1 | 20.4 | 4.2 | 39.9 | 6.8 | 79.6 | 11.8 | 79.8 | 7.0 |
| AD-1321204.1 | 18.4 | 3.7 | 20.2 | 2.0 | 51.0 | 6.7 | 75.6 | 3.3 |
| AD-1321205.1 | 71.6 | 2.6 | 80.8 | 8.7 | 80.1 | 17.4 | 81.9 | 6.6 |
| AD-1321206.1 | 17.2 | 1.7 | 25.3 | 1.7 | 53.8 | 8.0 | 83.1 | 7.3 |
| AD-1321207.1 | 11.8 | 2.5 | 18.4 | 1.3 | 34.3 | 3.4 | 55.7 | 4.8 |
| AD-1321208.1 | 24.7 | 2.8 | 32.9 | 3.0 | 61.9 | 8.7 | 75.8 | 7.5 |
| AD-1321209.1 | 27.8 | 1.3 | 33.0 | 3.9 | 48.9 | 1.7 | 72.6 | 1.5 |
| AD-1321210.1 | 12.4 | 1.8 | 15.9 | 1.3 | 30.9 | 8.2 | 50.6 | 4.2 |
| AD-1321211.1 | 44.7 | 6.1 | 42.6 | 5.1 | 78.3 | 12.9 | 100.4 | 9.7 |
| AD-1321212.1 | 21.8 | 1.3 | 27.4 | 4.9 | 68.4 | 13.4 | 108.3 | 18.5 |
| AD-1321213.1 | 32.5 | 15.9 | 24.4 | 2.1 | 63.1 | 15.3 | 120.6 | 39.0 |
| AD-1321214.1 | 29.4 | 8.3 | 44.4 | 8.6 | 107.8 | 28.8 | 107.3 | 17.2 |
| AD-1321215.1 | 31.5 | 8.2 | 37.4 | 2.1 | 74.7 | 12.0 | 92.0 | 15.1 |
| AD-1321216.1 | 19.9 | 4.7 | 27.1 | 3.4 | 54.0 | 14.3 | 76.2 | 7.4 |
| AD-1321217.1 | 19.0 | 2.0 | 30.7 | 7.6 | 45.8 | 5.3 | 78.3 | 2.4 |
| AD-1321218.1 | 23.9 | 5.6 | 33.7 | 5.7 | 69.4 | 4.6 | 91.1 | 9.0 |
| AD-1321219.1 | 23.2 | 5.1 | 24.5 | 3.3 | 84.9 | 30.5 | 103.3 | 10.1 |
| AD-1321220.1 | 15.5 | 2.7 | 18.6 | 1.3 | 53.1 | 11.9 | 78.9 | 21.9 |
| AD-1321221.1 | 31.0 | 6.9 | 38.9 | 4.0 | 76.0 | 6.8 | 96.2 | 25.2 |
| AD-1321222.1 | 17.2 | 1.2 | 26.4 | 0.4 | 51.7 | 10.1 | 109.5 | 29.4 |
| AD-1321223.1 | 50.6 | 8.4 | 54.1 | 16.0 | 105.3 | 25.4 | 103.4 | 20.0 |
| AD-1321224.1 | 66.2 | 13.1 | 90.9 | 24.5 | 83.7 | 16.7 | 88.3 | 10.1 |
| AD-1321225.1 | 37.9 | 11.8 | 44.7 | 9.3 | 89.5 | 9.9 | 92.3 | 17.3 |
| AD-1321226.1 | 51.0 | 15.0 | 50.4 | 11.2 | 77.7 | 4.9 | 114.1 | 15.0 |
| AD-1321227.1 | 33.5 | 1.8 | 41.9 | 12.3 | 88.9 | 11.7 | 99.4 | 12.6 |
| AD-1321228.1 | 99.3 | 67.0 | 71.7 | 6.3 | 91.8 | 8.1 | 91.0 | 4.0 |
| AD-1321229.1 | 26.5 | 2.3 | 33.1 | 4.0 | 76.5 | 10.9 | 121.7 | 34.2 |
| AD-1321230.1 | 37.8 | 10.5 | 45.0 | 11.9 | 81.7 | 25.0 | 97.6 | 20.9 |
| AD-1321231.1 | 16.7 | 5.3 | 21.9 | 5.5 | 40.3 | 16.0 | 64.6 | 15.2 |
| AD-1321232.1 | 25.0 | 4.5 | 24.0 | 7.4 | 57.7 | 16.2 | 76.8 | 9.7 |
| AD-1321233.1 | 72.8 | 15.1 | 68.0 | 23.8 | 114.4 | 27.2 | 102.7 | 14.3 |
| AD-1321234.1 | 25.6 | 4.6 | 33.5 | 6.3 | 63.2 | 7.9 | 99.1 | 7.4 |
| AD-1321235.1 | 17.4 | 3.7 | 20.1 | 2.1 | 45.2 | 6.5 | 85.2 | 4.0 |
| AD-1321236.1 | 35.7 | 15.1 | 36.0 | 2.8 | 73.4 | 8.5 | 106.5 | 33.8 |
| AD-1321237.1 | 34.0 | 1.8 | 42.9 | 2.7 | 79.4 | 3.5 | 211.3 | 62.3 |
| AD-1321238.1 | 22.4 | 11.5 | 22.9 | 5.8 | 50.2 | 18.5 | 119.1 | 31.9 |
| AD-1321239.1 | 25.9 | 6.2 | 31.8 | 6.6 | 71.6 | 25.7 | 98.4 | 20.3 |
| AD-1321240.1 | 81.8 | 18.9 | 92.0 | 17.7 | 115.4 | 22.1 | 112.4 | 20.5 |
| AD-1321241.1 | 56.8 | 14.7 | 68.4 | 10.8 | 114.5 | 12.4 | 112.0 | 12.8 |
| AD-1321242.1 | 20.9 | 0.8 | 27.2 | 6.8 | 60.5 | 5.3 | 105.5 | 36.8 |
| AD-1321243.1 | 16.3 | 3.8 | 20.9 | 3.8 | 40.0 | 5.4 | 87.3 | 41.9 |
| AD-1321244.1 | 25.9 | 2.6 | 33.4 | 2.3 | 72.2 | 23.6 | 142.4 | 55.0 |
| AD-1321245.1 | 19.6 | 3.2 | 26.5 | 3.3 | 53.4 | 3.3 | 87.5 | 25.1 |
| AD-1321246.1 | 13.2 | 1.1 | 18.8 | 2.8 | 51.6 | 16.9 | 72.2 | 17.2 |
| AD-1321247.1 | 51.2 | 6.7 | 58.7 | 18.8 | 106.1 | 24.6 | 110.8 | 29.0 |
| AD-1321248.1 | 72.4 | 26.1 | 68.2 | 16.5 | 127.1 | 27.3 | 104.4 | 4.6 |
| AD-1321249.1 | 50.0 | 2.6 | 63.0 | 7.4 | 104.3 | 6.6 | 120.2 | 26.5 |
| AD-1321250.1 | 42.9 | 7.2 | 85.7 | 22.3 | 99.3 | 14.1 | 147.4 | 32.8 |
| AD-1321251.1 | 73.8 | 17.4 | 95.7 | 12.4 | 102.3 | 4.7 | 122.5 | 17.5 |
| AD-1321252.1 | 67.0 | 12.9 | 74.3 | 11.8 | 107.9 | 18.3 | 98.8 | 10.7 |
| AD-1321253.1 | 19.7 | 3.5 | 29.9 | 13.6 | 92.2 | 20.1 | 119.7 | 30.0 |
| AD-1321254.1 | 17.5 | 3.7 | 31.6 | 12.1 | 68.1 | 28.4 | 82.7 | 5.0 |
| AD-1321255.1 | 28.9 | 8.6 | 34.5 | 7.8 | 99.4 | 31.3 | 101.2 | 10.5 |
| AD-1321256.1 | 22.5 | 4.9 | 21.2 | 3.1 | 63.8 | 18.1 | 80.1 | 8.2 |
| AD-1321257.1 | 16.5 | 1.8 | 23.7 | 3.8 | 41.4 | 15.2 | 78.4 | 9.8 |
| AD-1321258.1 | 24.0 | 3.1 | 37.7 | 7.4 | 84.8 | 14.6 | 106.0 | 15.1 |
| AD-1321259.1 | 23.1 | 1.8 | 30.6 | 3.1 | 73.6 | 5.5 | 132.6 | 38.2 |
| AD-1321260.1 | 34.0 | 7.0 | 44.6 | 19.7 | 79.6 | 10.4 | 102.5 | 23.9 |
| AD-1321261.1 | 20.1 | 3.0 | 34.9 | 12.3 | 78.3 | 18.5 | 109.5 | 28.6 |
| AD-1321262.1 | 40.8 | 4.8 | 63.8 | 14.1 | 101.9 | 37.9 | 97.4 | 15.7 |
| AD-1321263.1 | 46.9 | 6.2 | 54.8 | 7.4 | 88.2 | 17.4 | 112.6 | 32.6 |
| AD-1321264.1 | 34.3 | 2.4 | 43.1 | 11.3 | 101.2 | 31.5 | 125.3 | 29.6 |
| AD-1321265.1 | 19.1 | 2.5 | 21.7 | 4.5 | 53.6 | 1.0 | 78.5 | 5.8 |
| AD-1321266.1 | 37.1 | 3.4 | 51.1 | 15.7 | 85.1 | 11.7 | 106.4 | 13.8 |
| AD-1321267.1 | 30.9 | 7.9 | 45.6 | 10.0 | 80.9 | 7.5 | 88.7 | 9.2 |
| AD-1321268.1 | 91.7 | 22.7 | 110.6 | 34.2 | 93.5 | 24.1 | 92.9 | 12.1 |
| AD-1321269.1 | 40.8 | 2.0 | 63.9 | 16.8 | 87.6 | 25.6 | 108.8 | 40.7 |
| AD-1321270.1 | 29.1 | 1.6 | 38.0 | 5.0 | 87.4 | 19.0 | 114.4 | 43.7 |
| AD-1321271.1 | 73.6 | 4.5 | 95.7 | 35.7 | 118.4 | 16.7 | 106.0 | 18.9 |
| AD-1321272.1 | 65.8 | 3.9 | 70.6 | 20.3 | 134.7 | 50.9 | 159.4 | 62.2 |
| AD-1321273.1 | 18.8 | 2.7 | 32.7 | 8.3 | 58.3 | 4.5 | 143.3 | 40.1 |
| AD-1321274.1 | 43.4 | 1.9 | 72.3 | 13.9 | 104.3 | 31.6 | 154.1 | 37.6 |
| AD-1321275.1 | 35.0 | 4.0 | 69.5 | 6.7 | 104.2 | 28.2 | 142.6 | 53.5 |
| AD-1321276.1 | 13.4 | 1.4 | 24.2 | 10.8 | 38.0 | 11.4 | 65.8 | 8.5 |
| AD-1321277.1 | 23.7 | 4.5 | 31.7 | 2.5 | 67.8 | 9.1 | 78.3 | 3.6 |
| AD-1321278.1 | 44.1 | 3.9 | 64.6 | 12.3 | 90.8 | 7.4 | 112.7 | 16.7 |
| AD-1321279.1 | 33.5 | 3.8 | 50.9 | 12.8 | 100.6 | 45.8 | 104.9 | 22.6 |
| AD-1321280.1 | 15.7 | 2.2 | 29.2 | 9.7 | 47.9 | 10.5 | 106.6 | 17.4 |
| AD-1321281.1 | 31.0 | 3.0 | 67.9 | 14.8 | 101.8 | 20.2 | 143.5 | 22.6 |
| AD-1321282.1 | 20.1 | 3.6 | 40.9 | 12.3 | 74.5 | 18.4 | 163.2 | 37.1 |
| AD-1321283.1 | 16.7 | 1.1 | 36.6 | 5.5 | 46.5 | 8.9 | 85.1 | 3.7 |
| AD-1321284.1 | 19.0 | 1.4 | 26.0 | 9.1 | 37.1 | 4.3 | 67.3 | 12.0 |
| AD-1321285.1 | 12.6 | 1.2 | 16.6 | 3.4 | 47.6 | 2.0 | 75.9 | 8.5 |
| AD-1321286.1 | 13.5 | 1.3 | 15.8 | 4.1 | 33.8 | 6.5 | 70.6 | 13.0 |
| AD-1321287.1 | 12.9 | 0.9 | 16.9 | 1.1 | 29.8 | 4.5 | 62.9 | 10.2 |
| AD-1321288.1 | 13.7 | 2.1 | 17.1 | 2.7 | 31.6 | 3.5 | 65.2 | 4.8 |
| AD-1321289.1 | 21.7 | 3.6 | 29.3 | 11.3 | 74.4 | 19.5 | 81.0 | 10.9 |
| AD-1321290.1 | 15.8 | 2.2 | 24.1 | 8.2 | 50.3 | 12.3 | 111.6 | 32.3 |
| AD-1321291.1 | 17.1 | 3.1 | 29.3 | 9.6 | 57.8 | 17.7 | 95.2 | 20.9 |

### Example 3. In Vivo Evaluation in Mice

[0993] Duplexes of interest, identified from the above studies, were further evaluated in vivo. In particular, at pre-dose day −14 wild-type mice (C57BL/6) were transduced by retro-orbital administration of 2×10¹⁰ viral particles of an adeno-associated virus 8 (AAV8) vector encoding human SOD1.

[0994] At day 0, groups of three mice were subcutaneously administered a single 3 mg/kg dose of the agents of interest or PBS control. Table 16 provides the treatment groups and Table 18 provides the modified and unmodified nucleotide sequences of the sense and antisense strands of the duplexes of interest. At day 7 post-dose animals were sacrificed, retro-orbital bleeding were performed. Liver samples were collected at day 7 post-dose, and snap-frozen in liquid nitrogen. Tissue mRNA was extracted and analyzed by the RT-QPCR method.

[0995] Human SOD1 mRNA levels were compared to housekeeping gene GAPDH. The values were then normalized to the average of PBS vehicle control group. The data were expressed as percent of baseline value, and presented as mean plus standard deviation. The results, listed in Table 17 and shown in FIG. 1, demonstrate that the exemplary duplex agents tested effectively reduce the level of the human SOD1 messenger RNA in vivo.

TABLE 16
Treatment Groups

| | Animal | | | |
|---|---|---|---|---|
| Group # | # | Treatment | Dose (mpk) | TD |
| 1 | 1 | PBS | n/a | d7 |
| | 2 | | | |
| | 3 | | | |
| 2 | 4 | AAV + Ctrl | 3 | |
| | 5 | (AD-64228.39) | | |
| | 6 | | | |
| 3 | 7 | AD-1321210.2 | 3 | |
| | 8 | | | |
| | 9 | | | |
| 4 | 10 | AD-1321207.2 | 3 | |
| | 11 | | | |
| | 12 | | | |
| 5 | 13 | AD-1321276.2 | 3 | |
| | 14 | | | |
| | 15 | | | |
| 6 | 16 | AD-1321257.2 | 3 | |
| | 17 | | | |
| | 18 | | | |
| 7 | 19 | AD-1321246.2 | 3 | |
| | 20 | | | |
| | 21 | | | |
| 8 | 22 | AD-1321280.2 | 3 | |
| | 23 | | | |
| | 24 | | | |
| 9 | 25 | AD-1321232.2 | 3 | |
| | 26 | | | |
| | 27 | | | |
| 10 | 28 | AD-1321238.2 | 3 | |
| | 29 | | | |
| | 30 | | | |
| 11 | 31 | AD-1321220.2 | 3 | |
| | 32 | | | |
| | 33 | | | |
| 12 | 34 | AD-1321219.2 | 3 | |
| | 35 | | | |
| | 36 | | | |
| 13 | 37 | AD-1321204.2 | 3 | |
| | 38 | | | |
| | 39 | | | |
| 14 | 40 | AD-1321222.2 | 3 | |
| | 41 | | | |
| | 42 | | | |
| 15 | 43 | AD-1321243.2 | 3 | |
| | 44 | | | |
| | 45 | | | |
| 16 | 46 | AD-1321256.2 | 3 | |
| | 47 | | | |
| | 48 | | | |
| 17 | 49 | AD-1321284.2 | 3 | |
| | 50 | | | |
| | 51 | | | |
| 18 | 52 | Naïve (AAV only) | n/a | |
| | 53 | | | |
| | 54 | | | |
| 19 | 55 | | | |
| | 56 | | | |
| | 57 | | | |
| 19 | 55 | | | |
| | 56 | | | |
| | 57 | | | |

TABLE 17

| | % Message | | |
|---|---|---|---|
| Duplex | Remaining | SD | Sample |
| PBS | 101.2654922 | 19.63002982 | Liver |
| AAV + Ctrl (AD- | 35.31638173 | 0.262604802 | Liver |
| 64228.39) | | | |
| AD-1321210.2 | 30.42438251 | 19.91605213 | Liver |
| AD-1321207.2 | 30.25915539 | 6.758286564 | Liver |
| AD-1321276.2 | 60.10435363 | 9.664373248 | Liver |
| AD-1321257.2 | 42.2278116 | 12.20020318 | Liver |
| AD-1321246.2 | 31.12908021 | 6.362946317 | Liver |
| AD-1321280.2 | 60.34803578 | 3.949191278 | Liver |
| AD-1321232.2 | 56.60772288 | 6.333661103 | Liver |
| AD-1321238.2 | 14.6775853 | 5.863189424 | Liver |
| AD-1321220.2 | 74.41995976 | 22.16007547 | Liver |
| AD-1321219.2 | 55.78880525 | 1.781783363 | Liver |
| AD-1321204.2 | 51.1507952 | 16.4638919 | Liver |
| AD-1321222.2 | 53.99310372 | 9.219313647 | Liver |
| AD-1321243.2 | 34.54117695 | 1.128855605 | Liver |
| AD-1321256.2 | 27.38377094 | 11.20122452 | Liver |
| AD-1321284.2 | 68.29130171 | 23.82285508 | Liver |
| Naïve (AAV only) | 75.69780392 | 23.65689142 | Liver |

TABLE 18
Unmodified and Modified Nucleotide Sequences of the Duplexes of Interest

| | | | SEQ | | SEQ |
|---|---|---|---|---|---|
| | | Modified Sequence | ID | Unmodified Sequence | ID |
| Duplex Name | Strand | 5′ to 3′ | NO: | 5′ to 3′ | NO: |
| AD-1321204.2 | sense | asuscaa(Uhd)UfuCfGfAfgcagaaggaaL96 | 1069 | AUCAAUUUCGAGCAGAAGGAA | 63 |
| | antis | usUfsccdTu(C2p)ugcucgAfaAfuugausgsa | 1159 | UUCCTUCUGCUCGAAAUUGAUGA | 1010 |
| AD-1321207.2 | sense | asasuuu(Chd)GfaGfCfAfgaaggaaaguL96 | 1072 | AAUUUCGAGCAGAAGGAAAGU | 454 |
| | antis | asCfsuudTc(C2p)uucugcUfcGfaaauusgsa | 1162 | ACUUTCCUUCUGCUCGAAAUUGA | 1013 |
| AD-1321210.2 | sense | ususcga(Ghd)CfaGfAfAfggaaaguaauL96 | 1075 | UUCGAGCAGAAGGAAAGUAAU | 46 |
| | antis | asUfsuadCu(Tgn)uccuucUfgCfucgaasasu | 1165 | AUUACUTUCCUUCUGCUCGAAAU | 850 |
| AD-1321219.2 | sense | asasgga(Ahd)AfgUfAfAfuggaccaguuL96 | 1084 | AAGGAAAGUAAUGGACCAGUU | 85 |
| | antis | asAfscudGg(Tgn)ccauuaCfuUfuccuuscsu | 1174 | AACUGGTCCAUUACUUUCCUUCU | 1021 |
| AD-1321220.2 | sense | asgsgaa(Ahd)GfuAfAfUfggaccagugaL96 | 1085 | AGGAAAGUAAUGGACCAGUGA | 458 |
| | antis | usCfsacdTg(G2p)uccauuAfcUfuuccususc | 1175 | UCACTGGUCCAUUACUUUCCUUC | 1022 |
| AD-1321222.2 | sense | gsasaag(Uhd)AfaUfGfGfaccagugaauL96 | 1087 | GAAAGUAAUGGACCAGUGAAU | 460 |
| | antis | asUfsucdAc(Tgn)gguccaUfuAfcuuucscsu | 1177 | AUUCACTGGUCCAUUACUUUCCU | 851 |
| AD-1321232.2 | sense | cscsagu(Ghd)CfaGfGfUfccucacuuuaL96 | 1097 | CCAGUGCAGGUCCUCACUUUA | 75 |
| | antis | usAfsaadGu(G2p)aggaccUfgCfacuggsusa | 1187 | UAAAGUGAGGACCUGCACUGGUA | 158 |
| AD-1321238.2 | sense | csasggu(Chd)CfuCfAfCfuuuaauccuuL96 | 1103 | CAGGUCCUCACUUUAAUCCUU | 41 |
| | antis | asAfsggaUfuaaagugAfgGfaccugscsa | 1193 | AAGGAUUAAAGUGAGGACCUGCA | 124 |
| AD-1321243.2 | sense | cscsuca(Chd)UfuUfAfAfuccucuaucuL96 | 1108 | CCUCACUUUAAUCCUCUAUCU | 42 |
| | antis | asGfsaudAg(Agn)ggauuaAfaGfugaggsasc | 1198 | AGAUAGAGGAUUAAAGUGAGGAC | 125 |
| AD-1321246.2 | sense | csascuu(Uhd)AfaUfCfCfucuauccagaL96 | 1111 | CACUUUAAUCCUCUAUCCAGA | 71 |
| | antis | asCfsuggAfuagaggaUfuAfaagugsasg | 1201 | ACUGGAUAGAGGAUUAAAGUGAG | 1030 |
| AD-1321256.2 | sense | asasgga(Uhd)GfaAfGfAfgaggcauguuL96 | 1121 | AAGGAUGAAGAGAGGCAUGUU | 474 |
| | antis | asAfscadTg(C2p)cucucuUfcAfuccuususg | 1211 | AACATGCCUCUCUUCAUCCUUUG | 1039 |
| AD-1321257.2 | sense | asgsgau(Ghd)AfaGfAfGfaggcauguuuL96 | 1122 | AGGAUGAAGAGAGGCAUGUUU | 475 |
| | antis | asAfsacdAu(G2p)ccucucUfuCfauccususu | 1212 | AAACAUGCCUCUCUUCAUCCUUU | 554 |
| AD-1321276.2 | sense | ususggg(Chd)AfaAfGfGfuggaaaugaaL96 | 1141 | UUGGGCAAAGGUGGAAAUGAA | 103 |
| | antis | usUfscadTu(Tgn)ccaccuUfuGfcccaasgsu | 1231 | UUCATUTCCACCUUUGCCCAAGU | 1051 |
| AD-1321280.2 | sense | gscsaaa(Ghd)GfuGfGfAfaaugaagaaaL96 | 1145 | GCAAAGGUGGAAAUGAAGAAA | 999 |
| | antis | usUfsucdTu(C2p)auuuccAfcCfuuugcscsc | 1235 | UUUCTUCAUUUCCACCUUUGCCC | 1055 |
| AD-1321284.2 | sense | asgsgug(Ghd)AfaAfUfGfaagaaaguauL96 | 1149 | AGGUGGAAAUGAAGAAAGUAU | 512 |
| | antis | asUfsacdTu(Tgn)cuucauUfuCfcaccususu | 1239 | AUACTUTCUUCAUUUCCACCUUU | 1059 |

### Example 4. In Vivo Assessment of RNAi Agents Targeting SOD1 in G93A-SOD1 Transgenic Mice

[0996] In order to demonstrate that a single intracerebroventricular injection (ICV) of a dsRNA agent similarly inhibits the expression of SOD1 in therapeutically relevant regions of the brain and spinal cord, male G93A-SOD1 transgenic mice received a single 25 μg, 50 μg, 100 μg, 150 μg, 200 kg, or 300 μg dose in a volume of 5 μl of AD-401824, or 5 μl of artificial CSF (aCSF) control (n=3 per group) by ICV injection using using a Hamilton syringe and an angled 30 G needle at Day 0. G93A-SOD1 mice express human SOD1 with the G93A mutation under control of the cistronic human SOD1 promotor. Mutations in this gene have been linked to familial Amyotrophic Lateral Sclerosis (ALS or Lou Gehrig's disease). The SOD1-G93A mice show a phenotype similar to Amyotrophic Lateral Sclerosis in humans. They develop paralysis in one or more limbs within a few weeks of age (see, e.g., Henriques, et al. (2010) PLoS One 5(11): e15445).

[0997] At Day 14 post-dose, animals were sacrificed and brain samples (right hemisphere, left hemisphere, cerebellum and brainstem) and spinal cord samples were collected and flash frozen in liquid nitrogen. mRNA was extracted from the tissue and analyzed by the RT-QPCR method.

[0998] The results, depicted in FIG. 2, demonstrate that a single ICV injection of between 50-300 ug of dsRNA agent provides consistent and robust knockdown of SOD1 in the CNS in a dose dependent manner. The results also demonstrate that a single dose of dsRNA agent between 150-300 ug knocks down SOD1 mRNA to its lowest levels across all tissue types.

TABLE 19
Unmodified Sense and Antisense Strand Sequences of Superoxide Dismutase 1 dsRNA Agents

| | | | | |
|---|---|---|---|---|
| | | Range in GenBank Accession | | Range in GenBank Accession |
| Duplex | SEQ ID | No. NM_ | SEQ ID | No. NM_ |

| Name | Sense Sequence 5′ to 3′ | NO: | 001285406.1 | 000454.4 | Antisense Sequence 5′ to 3′ | NO | 001285406.1 | 000454.4 |
|---|---|---|---|---|---|---|---|---|
| AD-1321204.3 | AUCAAUUUCGAGCAGAAGGAA | 63 | 55-75 | 203-223 | UUCCTUCUGCUCGAAAUUGAUGA | 1010 | 53-75 | 201-223 |
| AD-1395718.1 | AUCAAUUUCGAGCAGAAGGAA | 63 | 55-75 | 203-223 | UUCCTUCUGCUCGAAAUUGAUGG | 1289 | 53-75 | 201-223 |
| AD-1395719.1 | AUCAAUUUCGAGCAGAAGGAA | 63 | 55-75 | 203-223 | UUCCTUCUGCUCGAAAUUGAUGG | 1289 | 53-75 | 201-223 |
| AD-1395720.1 | AUCAAUUUCGAGCAGAAGGAA | 63 | 55-75 | 203-223 | UUCCTUCUGCUCGAAAUUGAUGG | 1289 | 53-75 | 201-223 |
| AD-1395721.1 | AUCAAUUUCGAGCAGAAGGAA | 63 | 55-75 | 203-223 | UTCCTUCUGCUCGAAAUUGAUGG | 1290 | 53-75 | 201-223 |
| AD-1395722.1 | AUCAAUUUCGAGCAGAAGGAA | 63 | 55-75 | 203-223 | UTCCTUCUGCUCGAAAUUGAUGG | 1290 | 53-75 | 201-223 |
| AD-1395723.1 | AUCAAUUUCGAGCAGAAGGAA | 63 | 55-75 | 203-223 | UTCCTUCUGCUCGAAAUUGAUGG | 1290 | 53-75 | 201-223 |
| AD-1321207.3 | AAUUUCGAGCAGAAGGAAAGU | 454 | 58-78 | 206-226 | ACUUTCCUUCUGCUCGAAAUUGA | 1013 | 56-78 | 204-226 |
| AD-1395724.1 | AAUUUCGAGCAGAAGGAAAGA | 1280 | 58-78 | 206-226 | UCUUTCCUUCUGCUCGAAAUUGG | 1291 | 56-78 | 204-226 |
| AD-1395725.1 | AAUUUCGAGCAGAAGGAAAGA | 1280 | 58-78 | 206-226 | UCUUTCCUUCUGCUCGAAAUUGG | 1291 | 56-78 | 204-226 |
| AD-1395726.1 | AAUUUCGAGCAGAAGGAAAGA | 1280 | 58-78 | 206-226 | UCUUTCCUUCUGCUCGAAAUUGG | 1291 | 56-78 | 204-226 |
| AD-1395727.1 | AAUUUCGAGCAGAAGGAAAGA | 1280 | 58-78 | 206-226 | UCUUTCCUUCUGCUCGAAAUUGG | 1291 | 56-78 | 204-226 |
| AD-1395728.1 | AAUUUCGAGCAGAAGGAAAGA | 1280 | 58-78 | 206-226 | UCUUTCCUUCUGCUCGAAAUUGG | 1291 | 56-78 | 204-226 |
| AD-1395729.1 | AAUUUCGAGCAGAAGGAAAGA | 1280 | 58-78 | 206-226 | UCUUTCCUUCUGCUCGAAAUUGG | 1291 | 56-78 | 204-226 |
| AD-1321210.3 | UUCGAGCAGAAGGAAAGUAAU | 46 | 61-81 | 209-229 | AUUACUTUCCUUCUGCUCGAAAU | 850 | 59-81 | 207-229 |
| AD-1395730.1 | UUCGAGCAGAAGGAAAGUAAU | 46 | 61-81 | 209-229 | AUUACUTUCCUUCUGCUCGAAAU | 850 | 59-81 | 207-229 |
| AD-1395731.1 | UUCGAGCAGAAGGAAAGUAAA | 1281 | 61-81 | 209-229 | UUUACUTUCCUUCUGCUCGAAAU | 1292 | 59-81 | 207-229 |
| AD-1395732.1 | UUCGAGCAGAAGGAAAGUAAA | 1281 | 61-81 | 209-229 | UUUACUTUCCUUCUGCUCGAAAU | 1292 | 59-81 | 207-229 |
| AD-1395733.1 | UUCGAGCAGAAGGAAAGUAAA | 1281 | 61-81 | 209-229 | UUUACUTUCCUUCUGCUCGAAAU | 1292 | 59-81 | 207-229 |
| AD-1395734.1 | UUCGAGCAGAAGGAAAGUAAA | 1281 | 61-81 | 209-229 | UTUACUTUCCUTCUGCUCGAAAU | 1293 | 59-81 | 207-229 |
| AD-1395735.1 | UUCGAGCAGAAGGAAAGUAAA | 1281 | 61-81 | 209-229 | UTUACUTUCCUTCUGCUCGAAAU | 1293 | 59-81 | 207-229 |
| AD-1395736.1 | UUCGAGCAGAAGGAAAGUAAA | 1281 | 61-81 | 209-229 | UTUACUTUCCUTCUGCUCGAAAU | 1293 | 59-81 | 207-229 |
| AD-1321219.3 | AAGGAAAGUAAUGGACCAGUU | 85 | 70-90 | 218-238 | AACUGGTCCAUUACUUUCCUUCU | 1021 | 68-90 | 216-238 |
| AD-1395737.1 | AAGGAAAGUAAUGGACCAGUA | 1282 | 70-90 | 218-238 | UACUGGTCCAUUACUUUCCUUCU | 1294 | 68-90 | 216-238 |
| AD-1395738.1 | AAGGAAAGUAAUGGACCAGUA | 1282 | 70-90 | 218-238 | UACUGGTCCAUTACUUUCCUUCU | 1295 | 68-90 | 216-238 |
| AD-1395739.1 | AAGGAAAGUAAUGGACCAGUA | 1282 | 70-90 | 218-238 | UACUGGTCCAUTACUTUCCUUCU | 1296 | 68-90 | 216-238 |
| AD-1321220.3 | AGGAAAGUAAUGGACCAGUGA | 458 | 71-91 | 219-239 | UCACTGGUCCAUUACUUUCCUUC | 1022 | 69-91 | 217-239 |
| AD-1395740.1 | AGGAAAGUAAUGGACCAGUGA | 458 | 71-91 | 219-239 | UCACTGGUCCAUUACUUUCCUUC | 1022 | 69-91 | 217-239 |
| AD-1395741.1 | AGGAAAGUAAUGGACCAGUGA | 458 | 71-91 | 219-239 | UCACTGGUCCATUACUUUCCUUC | 1297 | 69-91 | 217-239 |
| AD-1395742.1 | AGGAAAGUAAUGGACCAGUGA | 458 | 71-91 | 219-239 | UCACTGGUCCATUACTUUCCUUC | 1298 | 69-91 | 217-239 |
| AD-1321222.3 | GAAAGUAAUGGACCAGUGAAU | 460 | 73-93 | 221-241 | AUUCACTGGUCCAUUACUUUCCU | 851 | 71-93 | 219-241 |
| AD-1395743.1 | GAAAGUAAUGGACCAGUGAAA | 1283 | 73-93 | 221-241 | UUUCACTGGUCCAUUACUUUCCU | 1299 | 71-93 | 219-241 |
| AD-1395744.1 | GAAAGUAAUGGACCAGUGAAA | 1283 | 73-93 | 221-241 | UUUCACTGGUCCAUUACUUUCCU | 1299 | 71-93 | 219-241 |
| AD-1395745.1 | GAAAGUAAUGGACCAGUGAAA | 1283 | 73-93 | 221-241 | UUUCACTGGUCCAUUACUUUCCU | 1299 | 71-93 | 219-241 |
| AD-1395746.1 | GAAAGUAAUGGACCAGUGAAA | 1283 | 73-93 | 221-241 | UTUCACTGGUCCAUUACUUUCCU | 1300 | 71-93 | 219-241 |
| AD-1395747.1 | GAAAGUAAUGGACCAGUGAAA | 1283 | 73-93 | 221-241 | UTUCACTGGUCCAUUACUUUCCU | 1300 | 71-93 | 219-241 |
| AD-1395748.1 | GAAAGUAAUGGACCAGUGAAA | 1283 | 73-93 | 221-241 | UTUCACTGGUCCAUUACUUUCCU | 1300 | 71-93 | 219-241 |
| AD-1321232.3 | CCAGUGCAGGUCCUCACUUUA | 75 | 176-196 | 324-344 | UAAAGUGAGGACCUGCACUGGUA | 158 | 174-196 | 322-344 |
| AD-1395749.1 | CCAGUGCAGGUCCUCACUUUA | 75 | 176-196 | 324-344 | UAAAGUGAGGACCUGCACUGGUA | 158 | 174-196 | 322-344 |
| AD-1395750.1 | CCAGUGCAGGUCCUCACUUUA | 75 | 176-196 | 324-344 | UAAAGUGAGGACCUGCACUGGUG | 1301 | 174-196 | 322-344 |
| AD-1395751.1 | CCAGUGCAGGUCCUCACUUUA | 75 | 176-196 | 324-344 | UAAAGUGAGGACCUGCACUGGUG | 1301 | 174-196 | 322-344 |
| AD-1395752.1 | CCAGUGCAGGUCCUCACUUUA | 75 | 176-196 | 324-344 | UAAAGUGAGGACCUGCACUGGUG | 1301 | 174-196 | 322-344 |
| AD-1395753.1 | CCAGUGCAGGUCCUCACUUUA | 75 | 176-196 | 324-344 | UAAAGUGAGGACCUGCACUGGUG | 1301 | 174-196 | 322-344 |
| AD-1395754.1 | CCAGUGCAGGUCCUCACUUUA | 75 | 176-196 | 324-344 | UAAAGUGAGGACCUGCACUGGUG | 1301 | 174-196 | 322-344 |
| AD-1395755.1 | CCAGUGCAGGUCCUCACUUUA | 75 | 176-196 | 324-344 | UAAAGUGAGGACCUGCACUGGUG | 1301 | 174-196 | 322-344 |
| AD-1321238.3 | CAGGUCCUCACUUUAAUCCUU | 41 | 182-202 | 330-350 | AAGGAUUAAAGUGAGGACCUGCA | 124 | 180-202 | 328-350 |
| AD-1395756.1 | CAGGUCCUCACUUUAAUCCUA | 1284 | 182-202 | 330-350 | UAGGAUTAAAGTGAGGACCUGCG | 1302 | 180-202 | 328-350 |
| AD-1395757.1 | CAGGUCCUCACUUUAAUCCUA | 1284 | 182-202 | 330-350 | UAGGAUTAAAGTGAGGACCUGCG | 1302 | 180-202 | 328-350 |
| AD-1395758.1 | CAGGUCCUCACUUUAAUCCUA | 1284 | 182-202 | 330-350 | UAGGAUTAAAGTGAGGACCUGCG | 1302 | 180-202 | 328-350 |
| AD-1321243.3 | CCUCACUUUAAUCCUCUAUCU | 42 | 187-207 | 335-355 | AGAUAGAGGAUUAAAGUGAGGAC | 125 | 185-207 | 333-355 |
| AD-1395759.1 | CCUCACUUUAAUCCUCUAUCA | 1285 | 187-207 | 335-355 | UGAUAGAGGAUUAAAGUGAGGAC | 1303 | 185-207 | 333-355 |
| AD-1395760.1 | CCUCACUUUAAUCCUCUAUCA | 1285 | 187-207 | 335-355 | UGAUAGAGGAUTAAAGUGAGGAC | 1304 | 185-207 | 333-355 |
| AD-1395761.1 | CCUCACUUUAAUCCUCUAUCA | 1285 | 187-207 | 335-355 | UGAUAGAGGAUTAAAGUGAGGAC | 1304 | 185-207 | 333-355 |
| AD-1321246.3 | CACUUUAAUCCUCUAUCCAGA | 71 | 190-210 | 338-358 | ACUGGAUAGAGGAUUAAAGUGAG | 1030 | 188-210 | 336-358 |
| AD-1395762.1 | CACUUUAAUCCUCUAUCCAGA | 71 | 190-210 | 338-358 | UCUGGATAGAGGAUUAAAGUGAG | 858 | 188-210 | 336-358 |
| AD-1395763.1 | CACUUUAAUCCUCUAUCCAGA | 71 | 190-210 | 338-358 | UCUGGATAGAGGATUAAAGUGAG | 1305 | 188-210 | 336-358 |
| AD-1321256.3 | AAGGAUGAAGAGAGGCAUGUU | 474 | 226-246 | 374-394 | AACATGCCUCUCUUCAUCCUUUG | 1039 | 224-246 | 372-394 |
| AD-1395764.1 | AAGGAUGAAGAGAGGCAUGUA | 1286 | 226-246 | 374-394 | UACATGCCUCUCUUCAUCCUUUG | 1306 | 224-246 | 372-394 |
| AD-1395765.1 | AAGGAUGAAGAGAGGCAUGUA | 1286 | 226-246 | 374-394 | UACATGCCUCUCUUCAUCCUUUG | 1306 | 224-246 | 372-394 |
| AD-1395766.1 | AAGGAUGAAGAGAGGCAUGUA | 1286 | 226-246 | 374-394 | UACATGCCUCUCUUCAUCCUUUG | 1306 | 224-246 | 372-394 |
| AD-1395767.1 | AAGGAUGAAGAGAGGCAUGUA | 1286 | 226-246 | 374-394 | UACATGCCUCUCUUCAUCCUUUG | 1306 | 224-246 | 372-394 |
| AD-1395768.1 | AAGGAUGAAGAGAGGCAUGUA | 1286 | 226-246 | 374-394 | UACATGCCUCUCUUCAUCCUUUG | 1306 | 224-246 | 372-394 |
| AD-1395769.1 | AAGGAUGAAGAGAGGCAUGUA | 1286 | 226-246 | 374-394 | UACATGCCUCUCUUCAUCCUUUG | 1306 | 224-246 | 372-394 |
| AD-1321257.3 | AGGAUGAAGAGAGGCAUGUUU | 475 | 227-247 | 375-395 | AAACAUGCCUCUCUUCAUCCUUU | 554 | 225-247 | 373-395 |
| AD-1395770.1 | AGGAUGAAGAGAGGCAUGUUU | 475 | 227-247 | 375-395 | AAACAUGCCUCUCUUCAUCCUUU | 554 | 225-247 | 373-395 |
| AD-1395771.1 | AGGAUGAAGAGAGGCAUGUUA | 1287 | 227-247 | 375-395 | UAACAUGCCUCUCUUCAUCCUUU | 1307 | 225-247 | 373-395 |
| AD-1395772.1 | AGGAUGAAGAGAGGCAUGUUA | 1287 | 227-247 | 375-395 | UAACAUGCCUCUCUUCAUCCUUU | 1307 | 225-247 | 373-395 |
| AD-1395773.1 | AGGAUGAAGAGAGGCAUGUUA | 1287 | 227-247 | 375-395 | UAACAUGCCUCUCUUCAUCCUUU | 1307 | 225-247 | 373-395 |
| AD-1395774.1 | AGGAUGAAGAGAGGCAUGUUA | 1287 | 227-247 | 375-395 | UAACAUGCCUCTCUUCAUCCUUU | 1308 | 225-247 | 373-395 |
| AD-1395775.1 | AGGAUGAAGAGAGGCAUGUUA | 1287 | 227-247 | 375-395 | UAACAUGCCUCTCUUCAUCCUUU | 1308 | 225-247 | 373-395 |
| AD-1321276.3 | UUGGGCAAAGGUGGAAAUGAA | 103 | 379-399 | 527-547 | UUCATUTCCACCUUUGCCCAAGU | 1051 | 377-399 | 525-547 |
| AD-1395776.1 | UUGGGCAAAGGUGGAAAUGAA | 103 | 379-399 | 527-547 | UUCATUTCCACCUUUGCCCAAGU | 1051 | 377-399 | 525-547 |
| AD-1395777.1 | UUGGGCAAAGGUGGAAAUGAA | 103 | 379-399 | 527-547 | UUCATUTCCACCUUUGCCCAAGU | 1051 | 377-399 | 525-547 |
| AD-1395778.1 | UUGGGCAAAGGUGGAAAUGAA | 103 | 379-399 | 527-547 | UUCATUTCCACCUUUGCCCAAGU | 1051 | 377-399 | 525-547 |
| AD-1395779.1 | UUGGGCAAAGGUGGAAAUGAA | 103 | 379-399 | 527-547 | UTCATUTCCACCUUUGCCCAAGU | 1309 | 377-399 | 525-547 |
| AD-1395780.1 | UUGGGCAAAGGUGGAAAUGAA | 103 | 379-399 | 527-547 | UTCATUTCCACCUUUGCCCAAGU | 1309 | 377-399 | 525-547 |
| AD-1321280.3 | GCAAAGGUGGAAAUGAAGAAA | 999 | 383-403 | 531-551 | UUUCTUCAUUUCCACCUUUGCCC | 1055 | 381-403 | 529-551 |
| AD-1395781.1 | GCAAAGGUGGAAAUGAAGAAA | 999 | 383-403 | 531-551 | UUUCTUCAUUUCCACCUUUGCCC | 1055 | 381-403 | 529-551 |
| AD-1395782.1 | GCAAAGGUGGAAAUGAAGAAA | 999 | 383-403 | 531-551 | UUUCTUCAUUUCCACCUUUGCCC | 1055 | 381-403 | 529-551 |
| AD-1395783.1 | GCAAAGGUGGAAAUGAAGAAA | 999 | 383-403 | 531-551 | UUUCTUCAUUUCCACCUUUGCCC | 1055 | 381-403 | 529-551 |
| AD-1395784.1 | GCAAAGGUGGAAAUGAAGAAA | 999 | 383-403 | 531-551 | UTUCTUCAUUUCCACCUUUGCCC | 1310 | 381-403 | 529-551 |
| AD-1395785.1 | GCAAAGGUGGAAAUGAAGAAA | 999 | 383-403 | 531-551 | UTUCTUCAUUUCCACCUUUGCCC | 1310 | 381-403 | 529-551 |
| AD-1321284.3 | AGGUGGAAAUGAAGAAAGUAU | 512 | 387-407 | 535-555 | AUACTUTCUUCAUUUCCACCUUU | 1059 | 385-407 | 533-555 |
| AD-1395786.1 | AGGUGGAAAUGAAGAAAGUAU | 512 | 387-407 | 535-555 | AUACTUTCUUCAUUUCCACCUUU | 1059 | 385-407 | 533-555 |
| AD-1395787.1 | AGGUGGAAAUGAAGAAAGUAA | 1288 | 387-407 | 535-555 | UUACTUTCUUCAUUUCCACCUUU | 1311 | 385-407 | 533-555 |
| AD-1395788.1 | AGGUGGAAAUGAAGAAAGUAA | 1288 | 387-407 | 535-555 | UUACTUTCUUCAUUUCCACCUUU | 1311 | 385-407 | 533-555 |
| AD-1395789.1 | AGGUGGAAAUGAAGAAAGUAA | 1288 | 387-407 | 535-555 | UUACTUTCUUCAUUUCCACCUUU | 1311 | 385-407 | 533-555 |
| AD-1395790.1 | AGGUGGAAAUGAAGAAAGUAA | 1288 | 387-407 | 535-555 | UTACTUTCUUCAUUUCCACCUUU | 1312 | 385-407 | 533-555 |
| AD-1395791.1 | AGGUGGAAAUGAAGAAAGUAA | 1288 | 387-407 | 535-555 | UTACTUTCUUCAUUUCCACCUUU | 1312 | 385-407 | 533-555 |
| AD-1395792.1 | AGGUGGAAAUGAAGAAAGUAA | 1288 | 387-407 | 535-555 | UTACTUTCUUCAUUUCCACCUUU | 1312 | 385-407 | 533-555 |

TABLE 20
Modified Sense and Antisense Strand Sequences of Superoxide Dismutase 1 dsRNA Agents

| Duplex | | SEQ ID | | SEQ ID | | SEQ ID |
|---|---|---|---|---|---|---|
| Name | Sense Sequence 5′ to 3′ | NO: | Antisense Sequence 5′ to 3′ | NO: | mRNA target sequence | NO: |
| AD-1321204.3 | asuscaa(Uhd)UfuCfGfAfgcagaaggaaL96 | 1069 | usUfsccdTu(C2p)ugcucgAfaAfuugausgsa | 1159 | CCAUCAAUUUCGAGCAGAAGGAA | 395 |
| AD-1395718.1 | asuscaa(Uhd)uuCfGfAfgcagaaggsasa | 23 | VPusUfsccdTu(C2p)ugcucgAfaAfuugausgsg | 24 | CCAUCAAUUUCGAGCAGAAGGAA | 395 |
| AD-1395719.1 | asuscaa(Uhd)uuCfgAfgcagaaggsasa | 1313 | VPusUfsccdTu(C2p)ugcucgAfaAfuugausgsg | 24 | CCAUCAAUUUCGAGCAGAAGGAA | 395 |
| AD-1395720.1 | asuscaa(Uhd)uuCfgAfdGcagaaggsasa | 1314 | VPusUfsccdTu(C2p)ugcucgAfaAfuugausgsg | 24 | CCAUCAAUUUCGAGCAGAAGGAA | 395 |
| AD-1395721.1 | asuscaa(Uhd)uuCfGfAfgcagaaggsasa | 23 | VPusdTsccdTu(C2p)ugcudCgAfaauugausgsg | 1343 | CCAUCAAUUUCGAGCAGAAGGAA | 395 |
| AD-1395722.1 | asuscaa(Uhd)uuCfgAfgcagaaggsasa | 1313 | VPusdTsccdTu(C2p)ugcudCgAfaauugausgsg | 1343 | CCAUCAAUUUCGAGCAGAAGGAA | 395 |
| AD-1395723.1 | asuscaa(Uhd)uuCfgAfdGcagaaggsasa | 1314 | VPusdTsccdTu(C2p)ugcudCgAfaauugausgsg | 1343 | CCAUCAAUUUCGAGCAGAAGGAA | 395 |
| AD-1321207.3 | asasuuu(Chd)GfaGfCfAfgaaggaaaguL96 | 1072 | asCfsuudTc(C2p)uucugcUfcGfaaauusgsa | 1162 | UCAAUUUCGAGCAGAAGGAAAGU | 770 |
| AD-1395724.1 | asasuuu(Chd)gaGfCfAfgaaggaaasgsa | 29 | VPusCfsuudTc(C2p)uucugcUfcGfaaauusgsg | 30 | UCAAUUUCGAGCAGAAGGAAAGU | 770 |
| AD-1395725.1 | asasuuu(Chd)gagCfAfgaaggaaasgsa | 1315 | VPusCfsuudTc(C2p)uucugc UfcGfaaauusgsg | 30 | UCAAUUUCGAGCAGAAGGAAAGU | 770 |
| AD-1395726.1 | asasuuu(Chd)gadGcAfdGaaggaaasgsa | 1316 | VPusCfsuudTc(C2p)uucugcUfcGfaaauusgsg | 30 | UCAAUUUCGAGCAGAAGGAAAGU | 770 |
| AD-1395727.1 | asasuuu(Chd)gaGfCfAfgaaggaaasgsa | 29 | VPusdCsuudTc(C2p)uucudGcUfcgaaauusgsg | 1344 | UCAAUUUCGAGCAGAAGGAAAGU | 770 |
| AD-1395728.1 | asasuuu(Chd)gagCfAfgaaggaaasgsa | 1315 | VPusdCsuudTc(C2p)uucudGcUfcgaaauusgsg | 1344 | UCAAUUUCGAGCAGAAGGAAAGU | 770 |
| AD-1395729.1 | asasuuu(Chd)gadGcAfdGaaggaaasgsa | 1316 | VPusdCsuudTc(C2p)uucudGcUfcgaaauusgsg | 1344 | UCAAUUUCGAGCAGAAGGAAAGU | 770 |
| AD-1321210.3 | ususcga(Ghd)CfaGfAfAfggaaaguaauL96 | 1075 | asUfsuadCu(Tgn)uccuucUfgCfucgaasasu | 1165 | AUUUCGAGCAGAAGGAAAGUAAU | 378 |
| AD-1395730.1 | ususcgag(Chd)aGfAfAfggaaaguaauL96 | 1317 | asUfsuadCu(Tgn)uccuucUfgCfucgaasasu | 1165 | AUUUCGAGCAGAAGGAAAGUAAU | 378 |
| AD-1395731.1 | ususcgag(Chd)aGfAfAfggaaaguasasa | 15 | VPusUfsuadCu(Tgn)uccuucUfgCfucgaasasu | 16 | AUUUCGAGCAGAAGGAAAGUAAU | 378 |
| AD-1395732.1 | ususcgag(Chd)agAfAfggaaaguasasa | 1318 | VPusUfsuadCu(Tgn)uccuucUfgCfucgaasasu | 16 | AUUUCGAGCAGAAGGAAAGUAAU | 378 |
| AD-1395733.1 | ususcgag(Chd)adGaAfdGgaaaguasasa | 1319 | VPusUfsuadCu(Tgn)uccuucUfgCfucgaasasu | 16 | AUUUCGAGCAGAAGGAAAGUAAU | 378 |
| AD-1395734.1 | ususcgag(Chd)aGfAfAfggaaaguasasa | 15 | VPusdTsuadCu(Tgn)uccudTcUfgcucgaasasu | 1345 | AUUUCGAGCAGAAGGAAAGUAAU | 378 |
| AD-1395735.1 | ususcgag(Chd)agAfAfggaaaguasasa | 1318 | VPusdTsuadCu(Tgn)uccudTcUfgcucgaasasu | 1345 | AUUUCGAGCAGAAGGAAAGUAAU | 378 |
| AD-1395736.1 | ususcgag(Chd)adGaAfdGgaaaguasasa | 1319 | VPusdTsuadCu(Tgn)uccudTcUfgcucgaasasu | 1345 | AUUUCGAGCAGAAGGAAAGUAAU | 378 |
| AD-1321219.3 | asasgga(Ahd)AfgUfAfAfuggaccaguuL96 | 1084 | asAfscudGg(Tgn)ccauuaCfuUfuccuuscsu | 1174 | AGAAGGAAAGUAAUGGACCAGUG | 417 |
| AD-1395737.1 | asasgga(Ahd)agUfAfAfuggaccagsusa | 21 | VPusAfscudGg(Tgn)ccauuaCfuUfuccuuscsu | 1346 | AGAAGGAAAGUAAUGGACCAGUG | 417 |
| AD-1395738.1 | asasgga(Ahd)agUfAfAfuggaccagsusa | 21 | VPusdAscudGg(Tgn)ccaudTaCfuuuccuuscsu | 22 | AGAAGGAAAGUAAUGGACCAGUG | 417 |
| AD-1395739.1 | asasgga(Ahd)agUfAfAfuggaccagsusa | 21 | VPusdAscudGg(Tgn)ccaudTadCudTuccuuscsu | 1347 | AGAAGGAAAGUAAUGGACCAGUG | 417 |
| AD-1321220.3 | asgsgaa(Ahd)GfuAfAfUfggaccagugaL96 | 1085 | usCfsacdTg(G2p)uccauuAfcUfuuccususc | 1175 | GAAGGAAAGUAAUGGACCAGUGA | 774 |
| AD-1395740.1 | asgsgaa(Ahd)guAfAfUfggaccagusgsa | 1320 | VPusCfsacdTg(G2p)uccauuAfcUfuuccususc | 1348 | GAAGGAAAGUAAUGGACCAGUGA | 774 |
| AD-1395741.1 | asgsgaa(Ahd)guAfAfUfggaccagusgsa | 1320 | VPusdCsacdTg(G2p)uccadTuAfcuuuccususc | 1349 | GAAGGAAAGUAAUGGACCAGUGA | 774 |
| AD-1395742.1 | asgsgaa(Ahd)guAfAfUfggaccagusgsa | 1320 | VPusdCsacdTg(G2p)uccadTudAcdTuuccususc | 1350 | GAAGGAAAGUAAUGGACCAGUGA | 774 |
| AD-1321222.3 | gsasaag(Uhd)AfaUfGfGfaccagugaauL96 | 1087 | asUfsucdAc(Tgn)gguccaUfuAfcuuucscsu | 1177 | AGGAAAGUAAUGGACCAGUGAAG | 776 |
| AD-1395743.1 | gsasaag(Uhd)aaUfGfGfaccagugasasa | 17 | VPusUfsucdAc(Tgn)gguccaUfuAfcuuucscsu | 18 | AGGAAAGUAAUGGACCAGUGAAG | 776 |
| AD-1395744.1 | gsasaag(Uhd)aaUfgdGaccagugasasa | 1321 | VPusUfsucdAc(Tgn)gguccaUfuAfcuuucscsu | 18 | AGGAAAGUAAUGGACCAGUGAAG | 776 |
| AD-1395745.1 | gsasaag(Uhd)aaUfgdGAfccagugasasa | 1322 | VPusUfsucdAc(Tgn)gguccaUfuAfcuuucscsu | 18 | AGGAAAGUAAUGGACCAGUGAAG | 776 |
| AD-1395746.1 | gsasaag(Uhd)aaUfGfGfaccagugasasa | 17 | VPusdTsucdAc(Tgn)ggucdCaUfuacuuucscsu | 1351 | AGGAAAGUAAUGGACCAGUGAAG | 776 |
| AD-1395747.1 | gsasaag(Uhd)aaUfgdGaccagugasasa | 1321 | VPusdTsucdAc(Tgn)ggucdCaUfuacuuucscsu | 1351 | AGGAAAGUAAUGGACCAGUGAAG | 776 |
| AD-1395748.1 | gsasaag(Uhd)aaUfgdGAfccagugasasa | 1322 | VPusdTsucdAc(Tgn)ggucdCaUfuacuuucscsu | 1351 | AGGAAAGUAAUGGACCAGUGAAG | 776 |
| AD-1321232.3 | cscsagu(Ghd)CfaGfGfUfccucacuuuaL96 | 1097 | usAfsaadGu(G2p)aggaccUfgCfacuggsusa | 1187 | UACCAGUGCAGGUCCUCACUUUA | 407 |
| AD-1395749.1 | cscsagug(Chd)aGfGfUfccucacuuuaL96 | 1323 | usAfsaadGu(G2p)aggaccUfgCfacuggsusa | 1187 | UACCAGUGCAGGUCCUCACUUUA | 407 |
| AD-1395750.1 | cscsagug(Chd)aGfGfUfccucacuususa | 1324 | VPusAfsaadGu(G2p)aggaccUfgCfacuggsusg | 1352 | UACCAGUGCAGGUCCUCACUUUA | 407 |
| AD-1395751.1 | cscsagug(Chd)adGgUfccucacuususa | 1325 | VPusAfsaadGu(G2p)aggaccUfgCfacuggsusg | 1352 | UACCAGUGCAGGUCCUCACUUUA | 407 |
| AD-1395752.1 | cscsagug(Chd)adGgUfCfcucacuususa | 1326 | VPusAfsaadGu(G2p)aggaccUfgCfacuggsusg | 1352 | UACCAGUGCAGGUCCUCACUUUA | 407 |
| AD-1395753.1 | cscsagug(Chd)aGfGfUfccucacuususa | 1324 | VPusdAsaadGu(G2p)aggadCcUfgcacuggsusg | 1353 | UACCAGUGCAGGUCCUCACUUUA | 407 |
| AD-1395754.1 | cscsagug(Chd)adGgUfccucacuususa | 1325 | VPusdAsaadGu(G2p)aggadCcUfgcacuggsusg | 1353 | UACCAGUGCAGGUCCUCACUUUA | 407 |
| AD-1395755.1 | cscsagug(Chd)adGgUfCfcucacuususa | 1326 | VPusdAsaadGu(G2p)aggadCcUfgcacuggsusg | 1353 | UACCAGUGCAGGUCCUCACUUUA | 407 |
| AD-1321238.3 | csasggu(Chd)CfuCfAfCfuuuaauccuuL96 | 1103 | asAfsggaUfuaaagugAfgGfaccugscsa | 1193 | UGCAGGUCCUCACUUUAAUCCUC | 373 |
| AD-1395756.1 | csasggu(Chd)cuCfAfCfuuuaauccsusa | 13 | VPusdAsggdAudTaaagdTgAfggaccugscsg | 14 | UGCAGGUCCUCACUUUAAUCCUC | 373 |
| AD-1395757.1 | csasggu(Chd)cuCfAfCfuuuaauccsusa | 13 | VPusdAsggdAudTaaagdTgdAgdGaccugscsg | 1354 | UGCAGGUCCUCACUUUAAUCCUC | 373 |
| AD-1395758.1 | csasggu(Chd)cuCfaCfUfuuaauccsusa | 1327 | VPusdAsggdAudTaaagdTgdAgdGaccugscsg | 1354 | UGCAGGUCCUCACUUUAAUCCUC | 373 |
| AD-1321243.3 | cscsuca(Chd)UfuUfAfAfuccucuaucuL96 | 1108 | asGfsaudAg(Agn)ggauuaAfaGfugaggsasc | 1198 | GUCCUCACUUUAAUCCUCUAUCC | 374 |
| AD-1395759.1 | cscsuca(Chd)uuUfAfAfuccucuauscsa | 25 | VPusGfsaudAg(Agn)ggauuaAfaGfugaggsasc | 1355 | GUCCUCACUUUAAUCCUCUAUCC | 374 |
| AD-1395760.1 | cscsuca(Chd)uuUfAfAfuccucuauscsa | 25 | VPusdGsaudAg(Agn)ggaudTaAfagugaggsasc | 26 | GUCCUCACUUUAAUCCUCUAUCC | 374 |
| AD-1395761.1 | cscsuca(Chd)uuUfAfAfuccucuauscsa | 25 | VPusdGsaudAg(Agn)ggaudTadAadGugaggsasc | 1356 | GUCCUCACUUUAAUCCUCUAUCC | 374 |
| AD-1321246.3 | csascuu(Uhd)AfaUfCfCfucuauccagaL96 | 1111 | asCfsuggAfuagaggaUfuAfaagugsasg | 1201 | CUCACUUUAAUCCUCUAUCCAGA | 403 |
| AD-1395762.1 | csascuu(Uhd)aaUfCfCfucuauccasgsa | 11 | VPusdCsugdGadTagagdGaUfuaaagugsasg | 12 | CUCACUUUAAUCCUCUAUCCAGA | 403 |
| AD-1395763.1 | csascuu(Uhd)aaUfCfCfucuauccasgsa | 11 | VPusdCsugdGadTagagdGadTudAaagugsasg | 1357 | CUCACUUUAAUCCUCUAUCCAGA | 403 |
| AD-1321256.3 | asasgga(Uhd)GfaAfGfAfgaggcauguuL96 | 1121 | asAfscadTg(C2p)cucucuUfcAfuccuususg | 1211 | CAAAGGAUGAAGAGAGGCAUGUU | 790 |
| AD-1395764.1 | asasgga(Uhd)gaAfGfAfgaggcaugsusa | 27 | VPusAfscadTg(C2p)cucucuUfcAfuccuususg | 28 | CAAAGGAUGAAGAGAGGCAUGUU | 790 |
| AD-1395765.1 | asasgga(Uhd)gaAfgAfdGaggcaugsusa | 1328 | VPusAfscadTg(C2p)cucucuUfcAfuccuususg | 28 | CAAAGGAUGAAGAGAGGCAUGUU | 790 |
| AD-1395766.1 | asasgga(Uhd)gadAgdAgaggcaugsusa | 1329 | VPusAfscadTg(C2p)cucucuUfcAfuccuususg | 28 | CAAAGGAUGAAGAGAGGCAUGUU | 790 |
| AD-1395767.1 | asasgga(Uhd)gaAfGfAfgaggcaugsusa | 27 | VPusdAscadTg(C2p)cucudCuUfcauccuususg | 1358 | CAAAGGAUGAAGAGAGGCAUGUU | 790 |
| AD-1395768.1 | asasgga(Uhd)gaAfgAfdGaggcaugsusa | 1328 | VPusdAscadTg(C2p)cucudCuUfcauccuususg | 1358 | CAAAGGAUGAAGAGAGGCAUGUU | 790 |
| AD-1395769.1 | asasgga(Uhd)gadAgdAgaggcaugsusa | 1329 | VPusdAscadTg(C2p)cucudCuUfcauccuususg | 1358 | CAAAGGAUGAAGAGAGGCAUGUU | 790 |
| AD-1321257.3 | asgsgau(Ghd)AfaGfAfGfaggcauguuuL96 | 1122 | asAfsacdAu(G2p)ccucucUfuCfauccususu | 1212 | AAAGGAUGAAGAGAGGCAUGUUG | 791 |
| AD-1395770.1 | asgsga(Uhd)gAfaGfAfGfaggcauguuuL96 | 1330 | asAfsacdAu(G2p)ccucucUfuCfauccususu | 1212 | AAAGGAUGAAGAGAGGCAUGUUG | 791 |
| AD-1395771.1 | asgsga(Uhd)gaaGfAfGfaggcaugususa | 19 | VPusAfsacd Au(G2p)ccucucUfuCfauccususu | 20 | AAAGGAUGAAGAGAGGCAUGUUG | 791 |
| AD-1395772.1 | asgsga(Uhd)gaadGadGaggcaugususa | 1331 | VPusAfsacdAu(G2p)ccucucUfuCfauccususu | 20 | AAAGGAUGAAGAGAGGCAUGUUG | 791 |
| AD-1395773.1 | asgsga(Uhd)gaadGadGAfggcaugususa | 1332 | VPusAfsacdAu(G2p)ccucucUfuCfauccususu | 20 | AAAGGAUGAAGAGAGGCAUGUUG | 791 |
| AD-1395774.1 | asgsga(Uhd)gaadGadGaggcaugususa | 1331 | VPusdAsacdAu(G2p)ccucdTcUfucauccususu | 1359 | AAAGGAUGAAGAGAGGCAUGUUG | 791 |
| AD-1395775.1 | asgsga(Uhd)gaadGadGAfggcaugususa | 1332 | VPusdAsacdAu(G2p)ccucdTcUfucauccususu | 1359 | AAAGGAUGAAGAGAGGCAUGUUG | 791 |
| AD-1321276.3 | ususggg(Chd)AfaAfGfGfuggaaaugaaL96 | 1141 | usUfscadTu(Tgn)ccaccuUfuGfcccaasgsu | 1231 | ACUUGGGCAAAGGUGGAAAUGAA | 435 |
| AD-1395776.1 | ususggg(Chd)aaAfGfGfuggaaaugsasa | 1333 | VPusUfscadTu(Tgn)ccaccuUfuGfcccaasgsu | 1360 | ACUUGGGCAAAGGUGGAAAUGAA | 435 |
| AD-1395777.1 | ususggg(Chd)aaAfgdGuggaaaugsasa | 1334 | VPusUfscadTu(Tgn)ccaccuUfuGfcccaasgsu | 1360 | ACUUGGGCAAAGGUGGAAAUGAA | 435 |
| AD-1395778.1 | ususggg(Chd)aaAfgdGUfggaaaugsasa | 1335 | VPusUfscadTu(Tgn)ccaccuUfuGfcccaasgsu | 1360 | ACUUGGGCAAAGGUGGAAAUGAA | 435 |
| AD-1395779.1 | ususggg(Chd)aaAfgdGuggaaaugsasa | 1334 | VPusdTscadTu(Tgn)ccacdCuUfugcccaasgsu | 1361 | ACUUGGGCAAAGGUGGAAAUGAA | 435 |
| AD-1395780.1 | ususggg(Chd)aaAfgdGUfggaaaugsasa | 1335 | VPusdTscadTu(Tgn)ccacdCuUfugcccaasgsu | 1361 | ACUUGGGCAAAGGUGGAAAUGAA | 435 |
| AD-1321280.3 | gscsaaa(Ghd)GfuGfGfAfaaugaagaaaL96 | 1145 | usUfsucdTu(C2p)auuuccAfcCfuuugcscsc | 1235 | GGGCAAAGGUGGAAAUGAAGAAA | 1270 |
| AD-1395781.1 | gscsaaagGfuGfGfAfaaug(Ahd)agaaaL96 | 1336 | usUfsucdTu(C2p)auuuccAfcCfuuugcscsc | 1235 | GGGCAAAGGUGGAAAUGAAGAAA | 1270 |
| AD-1395782.1 | gscsaaagguGfGfAfaaug(Ahd)agasasa | 1337 | VPusUfsucdTu(C2p)auuuccAfcCfuuugcsc | 1362 | GGGCAAAGGUGGAAAUGAAGAAA | 1270 |
| AD-1395783.1 | gscsaaaggudGgAfaaug(Ahd)agasasa | 1338 | VPusUfsucdTu(C2p)auuuccAfcCfuuugcscsc | 1362 | GGGCAAAGGUGGAAAUGAAGAAA | 1270 |
| AD-1395784.1 | gscsaaagguGfGfAfaaug(Ahd)agasasa | 1337 | VPusdTsucdTu(C2p)auuudCcAfccuuugcscsc | 1363 | GGGCAAAGGUGGAAAUGAAGAAA | 1270 |
| AD-1395785.1 | gscsaaaggudGgAfaaug(Ahd)agasasa | 1338 | VPusdTsucdTu(C2p)auuudCcAfccuuugcscsc | 1363 | GGGCAAAGGUGGAAAUGAAGAAA | 1270 |
| AD-1321284.3 | asgsgug(Ghd)AfaAfUfGfaagaaaguauL96 | 1149 | asUfsacdTu(Tgn)cuucauUfuCfcaccususu | 1239 | AAAGGUGGAAAUGAAGAAAGUAA | 1273 |
| AD-1395786.1 | asgsguggAfaAfUfGfaaga(Ahd)aguauL96 | 1339 | asUfsacdTu(Tgn)cuucauUfuCfcaccususu | 1239 | AAAGGUGGAAAUGAAGAAAGUAA | 1273 |
| AD-1395787.1 | asgsguggaaAfUfGfaaga(Ahd)agusasa | 1340 | VPusUfsacdTu(Tgn)cuucauUfuCfcaccususu | 1364 | AAAGGUGGAAAUGAAGAAAGUAA | 1273 |
| AD-1395788.1 | asgsguggaaAfudGaaga(Ahd)agusasa | 1341 | VPusUfsacdTu(Tgn)cuucauUfuCfcaccususu | 1364 | AAAGGUGGAAAUGAAGAAAGUAA | 1273 |
| AD-1395789.1 | asgsguggaaAfudGAfaga(Ahd)agusasa | 1342 | VPusUfsacdTu(Tgn)cuucauUfuCfcaccususu | 1364 | AAAGGUGGAAAUGAAGAAAGUAA | 1273 |
| AD-1395790.1 | asgsguggaaAfUfGfaaga(Ahd)agusasa | 1340 | VPusdTsacdTu(Tgn)cuucdAuUfuccaccususu | 1365 | AAAGGUGGAAAUGAAGAAAGUAA | 1273 |
| AD-1395791.1 | asgsguggaaAfudGaaga(Ahd)agusasa | 1341 | VPusdTsacdTu(Tgn)cuucdAuUfuccaccususu | 1365 | AAAGGUGGAAAUGAAGAAAGUAA | 1273 |
| AD-1395792.1 | asgsguggaaAfudGAfaga(Ahd)agusasa | 1342 | VPusdTsacdTu(Tgn)cuucdAuUfuccaccususu | 1365 | AAAGGUGGAAAUGAAGAAAGUAA | 1273 |

TABLE 21
Superoxide Dismutase 1 In Vitro Single Dose Screens
in Primary Cynomolgus Hepatocytes (PCH) cells

| | 50 nM | | 10 nM | | 1 nM | | 0.1 nM | |
|---|---|---|---|---|---|---|---|---|
| Duplex | Avg | SD | Avg | SD | Avg | SD | Avg | SD |
| AD-1321204.3 | 4.2 | 0.5 | 9.4 | 7.6 | 32.0 | 7.5 | 44.4 | 15.6 |
| AD-1395718.1 | 10.2 | 1.2 | 7.0 | 1.5 | 16.1 | 6.8 | 16.1 | 2.0 |
| AD-1395719.1 | 129.7 | 21.2 | 70.3 | 9.2 | 77.6 | 5.3 | 62.8 | 5.6 |
| AD-1395720.1 | 142.6 | 13.6 | 112.8 | 39.7 | 97.6 | 8.4 | 86.1 | 11.1 |
| AD-1395721.1 | 26.0 | 4.4 | 18.1 | 2.7 | 37.3 | 2.0 | 42.9 | 5.7 |
| AD-1395722.1 | 83.9 | 33.3 | 71.4 | 15.4 | 106.4 | 12.8 | 109.9 | 25.9 |
| AD-1395723.1 | 127.6 | 19.8 | 118.0 | 41.9 | 110.2 | 2.2 | 114.6 | 25.6 |
| AD-1321207.3 | 3.1 | 1.0 | 3.3 | 1.0 | 17.2 | 5.7 | 27.7 | 7.6 |
| AD-1395724.1 | 2.3 | 0.2 | 3.3 | 0.3 | 13.3 | 7.5 | 12.1 | 4.2 |
| AD-1395725.1 | 29.8 | 9.8 | 13.0 | 0.7 | 23.2 | 3.1 | 26.2 | 1.9 |
| AD-1395726.1 | 114.1 | 21.8 | 70.9 | 13.1 | 74.3 | 14.6 | 56.2 | 6.8 |
| AD-1395727.1 | 7.3 | 1.2 | 5.5 | 0.4 | 12.7 | 2.8 | 19.2 | 3.7 |
| AD-1395728.1 | 66.0 | 6.7 | 19.4 | 2.2 | 37.5 | 3.9 | 52.2 | 2.2 |
| AD-1395729.1 | 57.4 | 8.0 | 48.7 | 14.0 | 62.5 | 8.9 | 63.9 | 15.7 |
| AD-1321210.3 | 2.5 | 0.6 | 2.0 | 0.5 | 9.5 | 2.4 | 13.9 | 2.9 |
| AD-1395730.1 | 1.7 | 0.6 | 2.5 | 0.8 | 15.4 | 7.0 | 24.1 | 6.9 |
| AD-1395731.1 | 1.3 | 0.2 | 2.7 | 0.4 | 9.8 | 0.6 | 11.8 | 0.8 |
| AD-1395732.1 | 59.2 | 9.9 | 21.8 | 4.2 | 34.3 | 2.2 | 46.3 | 6.0 |
| AD-1395733.1 | 63.5 | 14.3 | 13.0 | 4.1 | 15.6 | 2.6 | 23.8 | 2.8 |
| AD-1395734.1 | 2.0 | 0.7 | 2.4 | 0.4 | 8.1 | 1.6 | 13.9 | 1.3 |
| AD-1395735.1 | 4.8 | 1.0 | 5.9 | 0.9 | 17.6 | 2.0 | 31.0 | 6.2 |
| AD-1395736.1 | 22.7 | 4.3 | 6.3 | 1.0 | 14.9 | 4.4 | 23.8 | 5.5 |
| AD-1321219.3 | 2.7 | 0.4 | 3.1 | 0.7 | 22.3 | 3.6 | 46.1 | 14.1 |
| AD-1395737.1 | 2.7 | 0.7 | 3.9 | 0.1 | 14.6 | 1.0 | 17.3 | 5.9 |
| AD-1395738.1 | 3.0 | 1.7 | 3.6 | 0.5 | 11.3 | 1.7 | 21.4 | 6.5 |
| AD-1395739.1 | 6.7 | 2.3 | 7.0 | 1.1 | 18.0 | 3.5 | 35.0 | 10.0 |
| AD-1321220.3 | 2.3 | 0.5 | 2.3 | 0.4 | 15.5 | 4.8 | 37.3 | 8.1 |
| AD-1395740.1 | 1.5 | 0.2 | 3.0 | 0.6 | 9.0 | 2.9 | 13.0 | 4.0 |
| AD-1395741.1 | 2.0 | 0.1 | 2.7 | 0.5 | 13.1 | 3.6 | 22.8 | 9.2 |
| AD-1395742.1 | 2.8 | 0.7 | 3.2 | 0.5 | 12.2 | 5.3 | 24.5 | 5.8 |
| AD-1321222.3 | 2.7 | 0.3 | 4.0 | 0.9 | 23.1 | 2.5 | 46.7 | 12.7 |
| AD-1395743.1 | 7.4 | 3.0 | 5.3 | 2.0 | 17.1 | 4.7 | 25.2 | 6.5 |
| AD-1395744.1 | 80.7 | 9.7 | 48.0 | 10.7 | 56.2 | 10.5 | 78.6 | 8.3 |
| AD-1395745.1 | 106.6 | 11.9 | 56.1 | 20.2 | 53.4 | 2.9 | 81.7 | 8.8 |
| AD-1395746.1 | 11.3 | 2.3 | 8.9 | 0.6 | 29.8 | 5.9 | 61.3 | 10.4 |
| AD-1395747.1 | 34.9 | 6.1 | 43.3 | 2.1 | 66.6 | 4.6 | 89.5 | 8.3 |
| AD-1395748.1 | 84.6 | 10.5 | 61.1 | 9.7 | 76.1 | 9.1 | 103.6 | 16.4 |
| AD-1321232.3 | 23.9 | 4.4 | 7.0 | 1.0 | 21.0 | 2.6 | 36.8 | 11.9 |
| AD-1395749.1 | 9.6 | 3.3 | 4.8 | 0.5 | 38.1 | 11.0 | 60.9 | 10.6 |
| AD-1395750.1 | 5.3 | 2.0 | 6.6 | 1.0 | 16.4 | 2.6 | 38.4 | 14.7 |
| AD-1395751.1 | 92.3 | 7.9 | 58.5 | 15.2 | 63.6 | 6.2 | 87.6 | 11.6 |
| AD-1395752.1 | 119.3 | 16.0 | 65.1 | 24.8 | 68.6 | 9.2 | 85.8 | 11.1 |
| AD-1395753.1 | 10.9 | 3.5 | 6.7 | 0.8 | 16.3 | 2.8 | 40.5 | 9.3 |
| AD-1395754.1 | 49.0 | 3.6 | 45.2 | 6.1 | 59.8 | 7.5 | 83.6 | 7.3 |
| AD-1395755.1 | 65.5 | 7.2 | 26.3 | 10.9 | 48.8 | 5.2 | 75.5 | 10.9 |
| AD-1321238.3 | 3.4 | 0.6 | 4.7 | 0.8 | 22.5 | 2.1 | 46.3 | 9.5 |
| AD-1395756.1 | 12.2 | 3.1 | 8.1 | 0.7 | 18.1 | 4.0 | 32.8 | 14.7 |
| AD-1395757.1 | 3.2 | 0.8 | 4.2 | 0.6 | 13.1 | 3.0 | 34.7 | 15.2 |
| AD-1395758.1 | 80.0 | 13.6 | 39.0 | 12.2 | 41.6 | 1.8 | 53.8 | 5.3 |
| AD-1321243.3 | 2.2 | 1.3 | 2.4 | 0.3 | 13.4 | 2.1 | 37.7 | 17.9 |
| AD-1395759.1 | 1.5 | 0.9 | 2.9 | 0.9 | 8.6 | 1.4 | 16.8 | 8.9 |
| AD-1395760.1 | 2.0 | 0.6 | 2.9 | 0.6 | 10.4 | 2.1 | 26.1 | 9.7 |
| AD-1395761.1 | 4.6 | 1.2 | 4.6 | 1.1 | 18.7 | 3.8 | 38.7 | 8.0 |
| AD-1321246.3 | 1.6 | 0.6 | 2.0 | 0.4 | 15.7 | 1.9 | 40.9 | 20.4 |
| AD-1395762.1 | 8.3 | 2.5 | 6.4 | 1.2 | 13.7 | 2.2 | 32.7 | 9.7 |
| AD-1395763.1 | 11.4 | 2.6 | 9.7 | 0.6 | 21.0 | 2.7 | 50.3 | 14.5 |
| AD-1321256.3 | 1.5 | 0.2 | 1.7 | 0.2 | 7.5 | 2.0 | 22.7 | 5.3 |
| AD-1395764.1 | 5.7 | 2.5 | 2.5 | 0.4 | 6.0 | 0.5 | 15.4 | 5.7 |
| AD-1395765.1 | 76.1 | 12.4 | 37.6 | 6.6 | 30.4 | 1.9 | 41.6 | 9.6 |
| AD-1395766.1 | 90.9 | 14.9 | 35.9 | 10.9 | 29.8 | 4.2 | 36.7 | 5.9 |
| AD-1395767.1 | 4.7 | 0.9 | 3.0 | 0.6 | 9.2 | 2.0 | 17.8 | 4.8 |
| AD-1395768.1 | 88.4 | 21.7 | 58.2 | 18.0 | 39.7 | 2.6 | 45.7 | 6.6 |
| AD-1395769.1 | 93.1 | 23.8 | 79.7 | 2.5 | 67.7 | 29.9 | 69.8 | 5.0 |
| AD-1321257.3 | 1.6 | 0.4 | 2.8 | 0.7 | 11.1 | 3.5 | 27.6 | 4.7 |
| AD-1395770.1 | 3.0 | 0.6 | 2.5 | 0.4 | 10.6 | 4.8 | 23.3 | 2.7 |
| AD-1395771.1 | 3.2 | 1.0 | 3.1 | 0.5 | 7.5 | 0.3 | 13.7 | 1.9 |
| AD-1395772.1 | 42.6 | 18.2 | 16.7 | 2.5 | 22.9 | 7.7 | 31.4 | 3.5 |
| AD-1395773.1 | 22.7 | 7.2 | 9.2 | 0.7 | 22.8 | 10.2 | 30.5 | 5.2 |
| AD-1395774.1 | 30.2 | 9.0 | 12.0 | 1.4 | 28.3 | 7.4 | 36.6 | 5.3 |
| AD-1395775.1 | 24.7 | 13.4 | 15.4 | 4.8 | 23.6 | 7.2 | 33.6 | 6.5 |
| AD-1321276.3 | 2.1 | 0.3 | 3.0 | 0.7 | 10.8 | 5.0 | 20.3 | 2.7 |
| AD-1395776.1 | 3.8 | 0.3 | 4.0 | 1.1 | 9.7 | 1.8 | 17.3 | 2.8 |
| AD-1395777.1 | 63.4 | 15.6 | 38.5 | 6.0 | 43.7 | 11.2 | 56.0 | 14.3 |
| AD-1395778.1 | 91.7 | 14.4 | 66.4 | 10.5 | 48.4 | 16.8 | 53.7 | 11.6 |
| AD-1395779.1 | 99.2 | 17.5 | 87.2 | 16.3 | 120.4 | 52.7 | 99.6 | 29.0 |
| AD-1395780.1 | 81.5 | 12.3 | 82.8 | 9.1 | 95.5 | 18.8 | 103.6 | 17.9 |
| AD-1321280.3 | 6.0 | 0.8 | 5.3 | 1.5 | 18.5 | 9.6 | 35.4 | 7.2 |
| AD-1395781.1 | 3.9 | 0.4 | 3.8 | 1.0 | 13.8 | 5.4 | 25.6 | 3.3 |
| AD-1395782.1 | 5.2 | 4.1 | 4.0 | 0.4 | 10.5 | 4.9 | 16.2 | 0.9 |
| AD-1395783.1 | 66.8 | 17.7 | 46.6 | 8.4 | 83.7 | 36.1 | 84.0 | 15.5 |
| AD-1395784.1 | 4.6 | 1.5 | 3.9 | 0.9 | 15.5 | 5.5 | 30.0 | 7.7 |
| AD-1395785.1 | 80.5 | 16.4 | 56.2 | 13.0 | 66.2 | 9.1 | 106.8 | 29.1 |
| AD-1321284.3 | 7.4 | 1.9 | 5.2 | 2.3 | 18.3 | 10.9 | 37.0 | 22.0 |
| AD-1395786.1 | 12.5 | 1.0 | 9.4 | 6.1 | 46.3 | 28.2 | 80.0 | 25.2 |
| AD-1395787.1 | 21.4 | 4.7 | 12.3 | 2.1 | 18.4 | 7.3 | 33.0 | 12.9 |
| AD-1395788.1 | 131.2 | 18.7 | 132.1 | 23.4 | 77.1 | 23.8 | 93.8 | 28.1 |
| AD-1395789.1 | 147.3 | 32.6 | 105.3 | 19.7 | 68.1 | 25.2 | 90.4 | 51.6 |
| AD-1395790.1 | 11.0 | 1.9 | 7.9 | 2.4 | 20.6 | 9.0 | 40.8 | 15.5 |
| AD-1395791.1 | 101.8 | 24.9 | 97.5 | 30.7 | 114.8 | 51.9 | 129.7 | 38.0 |
| AD-1395792.1 | 122.6 | 25.4 | 167.1 | 42.2 | 155.0 | 40.6 | 129.3 | 50.0 |

TABLE 22
Superoxide Dismutase 1 In Vitro Single
Dose Screens in BE(2)C cells

| | 50 nM | | 10 nM | | 1 nM | | 0.1 nM | |
|---|---|---|---|---|---|---|---|---|
| Duplex | Avg | SD | Avg | SD | Avg | SD | Avg | SD |
| AD-1321204.3 | 2.6 | 1.9 | 5.5 | 1.1 | 20.1 | 4.8 | 37.7 | 6.1 |
| AD-1395718.1 | 4.7 | 1.5 | 6.1 | 5.5 | 5.2 | 1.2 | 10.9 | 2.8 |
| AD-1395719.1 | 100.1 | 45.1 | 25.1 | 4.5 | 17.7 | 7.0 | 20.8 | 4.5 |
| AD-1395720.1 | 99.7 | 33.1 | 36.4 | 4.8 | 27.4 | 3.5 | 37.8 | 5.2 |
| AD-1395721.1 | 8.6 | 1.4 | 5.2 | 0.9 | 7.5 | 1.1 | 18.4 | 12.6 |
| AD-1395722.1 | 72.9 | 10.4 | 61.6 | 26.4 | 30.6 | 2.5 | 38.8 | 6.5 |
| AD-1395723.1 | 104.8 | 45.1 | 38.2 | 5.2 | 33.6 | 7.9 | 37.8 | 4.9 |
| AD-1321207.3 | 2.1 | 0.5 | 5.1 | 1.9 | 12.9 | 1.6 | 25.7 | 5.9 |
| AD-1395724.1 | 2.4 | 0.6 | 4.1 | 1.5 | 4.3 | 1.0 | 8.3 | 0.9 |
| AD-1395725.1 | 56.9 | 10.0 | 11.4 | 2.5 | 7.6 | 3.1 | 11.1 | 2.7 |
| AD-1395726.1 | 108.0 | 36.1 | 43.8 | 9.2 | 25.9 | 6.6 | 22.0 | 4.4 |
| AD-1395727.1 | 6.7 | 1.2 | 4.5 | 2.1 | 7.2 | 2.0 | 15.7 | 8.2 |
| AD-1395728.1 | 63.6 | 12.4 | 16.5 | 4.2 | 15.9 | 3.1 | 23.7 | 6.3 |
| AD-1395729.1 | 80.8 | 17.0 | 37.5 | 8.9 | 24.5 | 8.0 | 33.3 | 4.9 |
| AD-1321210.3 | 4.1 | 1.9 | 4.3 | 1.6 | 10.8 | 4.3 | 16.8 | 9.8 |
| AD-1395730.1 | 2.5 | 0.7 | 4.4 | 1.4 | 12.1 | 3.6 | 28.4 | 21.1 |
| AD-1395731.1 | 2.2 | 1.1 | 3.5 | 2.7 | 4.9 | 2.4 | 6.2 | 2.4 |
| AD-1395732.1 | 46.5 | 11.0 | 11.1 | 4.5 | 8.8 | 2.2 | 15.6 | 1.9 |
| AD-1395733.1 | 52.4 | 13.8 | 14.5 | 5.0 | 7.0 | 1.2 | 14.8 | 3.5 |
| AD-1395734.1 | 3.3 | 1.9 | 3.5 | 1.2 | 7.8 | 4.5 | 12.7 | 2.8 |
| AD-1395735.1 | 7.9 | 2.0 | 4.1 | 1.2 | 10.2 | 2.9 | 15.5 | 6.3 |
| AD-1395736.1 | 20.0 | 7.8 | 7.0 | 2.6 | 7.9 | 3.6 | 9.8 | 2.4 |
| AD-1321219.3 | 4.0 | 1.1 | 7.2 | 2.5 | 25.2 | 10.8 | 47.9 | 9.1 |
| AD-1395737.1 | 4.2 | 2.5 | 5.3 | 3.8 | 10.9 | 6.1 | 13.8 | 10.8 |
| AD-1395738.1 | 2.1 | 0.6 | 3.4 | 1.1 | 6.0 | 2.4 | 8.7 | 3.4 |
| AD-1395739.1 | 7.0 | 2.1 | 6.4 | 2.8 | 14.3 | 6.5 | 34.4 | 14.0 |
| AD-1321220.3 | 3.1 | 1.3 | 6.9 | 3.7 | 22.8 | 4.7 | 50.6 | 24.7 |
| AD-1395740.1 | 2.5 | 0.9 | 3.8 | 1.7 | 6.3 | 2.6 | 11.4 | 3.9 |
| AD-1395741.1 | 3.0 | 1.0 | 4.1 | 2.0 | 8.1 | 2.1 | 10.4 | 4.6 |
| AD-1395742.1 | 2.9 | 1.0 | 3.3 | 0.6 | 6.5 | 1.9 | 11.7 | 5.2 |
| AD-1321222.3 | 5.1 | 2.9 | 12.0 | 7.1 | 35.8 | 19.3 | 55.3 | 27.1 |
| AD-1395743.1 | 4.2 | 0.5 | 4.6 | 2.1 | 9.0 | 5.3 | 11.4 | 3.0 |
| AD-1395744.1 | 74.6 | 18.0 | 39.0 | 6.8 | 34.4 | 5.6 | 58.5 | 9.8 |
| AD-1395745.1 | 82.3 | 17.6 | 47.8 | 15.1 | 53.1 | 17.7 | 70.1 | 28.8 |
| AD-1395746.1 | 7.4 | 0.9 | 8.5 | 4.1 | 21.9 | 6.7 | 41.2 | 14.8 |
| AD-1395747.1 | 80.1 | 12.9 | 59.5 | 8.5 | 65.4 | 18.0 | 105.6 | 33.0 |
| AD-1395748.1 | 124.8 | 1.3 | 80.2 | 16.6 | 60.1 | 25.5 | 116.2 | 22.8 |
| AD-1321232.3 | 14.9 | 2.6 | 14.7 | 7.4 | 33.3 | 13.5 | 76.1 | 19.7 |
| AD-1395749.1 | 6.0 | 1.4 | 7.8 | 5.8 | 30.3 | 20.9 | 62.5 | 24.8 |
| AD-1395750.1 | 4.3 | 1.8 | 3.7 | 1.2 | 5.8 | 2.3 | 11.4 | 4.0 |
| AD-1395751.1 | 76.0 | 9.7 | 44.2 | 9.0 | 48.1 | 16.3 | 60.7 | 6.8 |
| AD-1395752.1 | 78.1 | 8.0 | 62.8 | 8.3 | 54.8 | 18.2 | 73.6 | 13.5 |
| AD-1395753.1 | 6.8 | 2.3 | 8.1 | 1.9 | 16.4 | 4.0 | 34.4 | 8.8 |
| AD-1395754.1 | 68.1 | 21.5 | 27.7 | 7.1 | 65.5 | 14.9 | 79.4 | 27.9 |
| AD-1395755.1 | 98.0 | 24.7 | 37.0 | 16.2 | 67.5 | 18.0 | 83.0 | 20.7 |
| AD-1321238.3 | 3.5 | 1.5 | 6.8 | 3.6 | 16.5 | 13.3 | 22.6 | 4.2 |
| AD-1395756.1 | 5.6 | 1.1 | 3.3 | 1.2 | 4.7 | 1.9 | 5.6 | 2.0 |
| AD-1395757.1 | 2.9 | 1.2 | 2.7 | 1.8 | 8.0 | 3.0 | 35.2 | 15.8 |
| AD-1395758.1 | 36.1 | 7.6 | 15.0 | 3.6 | 16.8 | 3.3 | 29.6 | 11.3 |
| AD-1321243.3 | 3.5 | 2.0 | 7.0 | 2.5 | 17.1 | 2.9 | 24.0 | 2.4 |
| AD-1395759.1 | 3.8 | 1.8 | 3.2 | 1.5 | 5.8 | 1.8 | 9.0 | 4.6 |
| AD-1395760.1 | 3.2 | 2.3 | 3.5 | 1.3 | 6.4 | 4.9 | 9.1 | 2.8 |
| AD-1395761.1 | 5.3 | 1.1 | 5.9 | 1.5 | 10.7 | 1.9 | 19.4 | 8.8 |
| AD-1321246.3 | 3.4 | 3.7 | 3.3 | 0.9 | 10.3 | 3.3 | 23.1 | 13.1 |
| AD-1395762.1 | 1.6 | 1.3 | 2.1 | 0.6 | 2.9 | 0.8 | 5.6 | 2.6 |
| AD-1395763.1 | 3.6 | 0.7 | 3.4 | 0.6 | 6.6 | 1.8 | 14.1 | 5.7 |
| AD-1321256.3 | 3.1 | 2.2 | 6.3 | 5.1 | 10.9 | 3.3 | 20.3 | 1.1 |
| AD-1395764.1 | 2.3 | 1.0 | 2.5 | 0.3 | 6.1 | 1.4 | 11.3 | 3.0 |
| AD-1395765.1 | 86.7 | 33.4 | 31.8 | 8.0 | 19.0 | 7.6 | 23.7 | 4.1 |
| AD-1395766.1 | 67.2 | 29.3 | 19.8 | 10.2 | 13.0 | 4.3 | 16.7 | 3.3 |
| AD-1395767.1 | 5.0 | 1.1 | 7.0 | 3.0 | 10.5 | 4.4 | 16.4 | 5.2 |
| AD-1395768.1 | 100.0 | 28.9 | 56.1 | 31.8 | 7.8 | 1.0 | 11.6 | 2.0 |
| AD-1395769.1 | 49.7 | 34.7 | 28.2 | 6.5 | 11.2 | 2.4 | 16.9 | 3.9 |
| AD-1321257.3 | 3.0 | 0.7 | 4.0 | 2.5 | 11.9 | 3.9 | 24.8 | 4.9 |
| AD-1395770.1 | 3.5 | 2.1 | 4.5 | 1.3 | 12.7 | 1.8 | 24.3 | 8.1 |
| AD-1395771.1 | 2.7 | 1.1 | 1.9 | 0.8 | 5.6 | 2.0 | 8.1 | 2.2 |
| AD-1395772.1 | 55.4 | 13.2 | 17.8 | 9.3 | 12.5 | 4.2 | 11.3 | 8.5 |
| AD-1395773.1 | 43.6 | 15.7 | 8.6 | 2.1 | 13.6 | 5.4 | 16.4 | 1.4 |
| AD-1395774.1 | 26.4 | 6.7 | 6.8 | 2.3 | 24.8 | 32.6 | 13.0 | 3.5 |
| AD-1395775.1 | 13.4 | 6.7 | 4.9 | 1.0 | 10.3 | 10.2 | 9.3 | 1.6 |
| AD-1321276.3 | 2.5 | 0.9 | 3.9 | 2.0 | 29.3 | 28.0 | 19.6 | 3.2 |
| AD-1395776.1 | 2.4 | 0.8 | 12.8 | 14.4 | 26.7 | 26.0 | 12.7 | 4.4 |
| AD-1395777.1 | 86.1 | 34.8 | 16.8 | 4.3 | 15.9 | 4.6 | 17.5 | 3.2 |
| AD-1395778.1 | 80.3 | 37.1 | 33.8 | 11.2 | 20.9 | 14.3 | 17.6 | 3.6 |
| AD-1395779.1 | 57.8 | 19.2 | 25.0 | 6.9 | 19.6 | 4.5 | 30.8 | 5.3 |
| AD-1395780.1 | 62.9 | 18.7 | 21.0 | 6.3 | 15.0 | 7.1 | 26.4 | 5.5 |
| AD-1321280.3 | 4.1 | 1.8 | 4.5 | 0.9 | 20.5 | 5.0 | 34.4 | 10.0 |
| AD-1395781.1 | 5.2 | 2.0 | 5.2 | 1.3 | 16.3 | 9.8 | 34.4 | 24.1 |
| AD-1395782.1 | 3.8 | 1.3 | 2.5 | 1.0 | 5.1 | 0.6 | 10.2 | 2.6 |
| AD-1395783.1 | 50.6 | 15.8 | 15.3 | 4.1 | 18.6 | 3.7 | 42.6 | 10.3 |
| AD-1395784.1 | 5.1 | 1.2 | 3.0 | 0.7 | 7.7 | 2.8 | 13.7 | 2.1 |
| AD-1395785.1 | 63.8 | 28.5 | 20.2 | 10.0 | 22.9 | 6.5 | 46.9 | 13.7 |
| AD-1321284.3 | 9.9 | 2.5 | 7.5 | 2.6 | 26.3 | 3.9 | 37.9 | 10.9 |
| AD-1395786.1 | 24.7 | 21.5 | 13.7 | 3.1 | 91.2 | 59.0 | 94.0 | 39.7 |
| AD-1395787.1 | 17.3 | 6.1 | 9.8 | 4.4 | 7.8 | 1.0 | 25.0 | 7.8 |
| AD-1395788.1 | 69.3 | 16.3 | 70.6 | 28.2 | 56.4 | 40.4 | 36.8 | 12.4 |
| AD-1395789.1 | 70.7 | 24.9 | 31.2 | 5.2 | 30.6 | 19.8 | 43.0 | 24.7 |
| AD-1395790.1 | 9.4 | 3.2 | 8.4 | 6.3 | 9.6 | 3.7 | 21.0 | 6.2 |
| AD-1395791.1 | 75.9 | 22.1 | 34.4 | 12.2 | 27.8 | 6.5 | 46.6 | 12.1 |
| AD-1395792.1 | 74.7 | 29.5 | 27.8 | 4.7 | 19.2 | 1.6 | 51.3 | 19.8 |

### Example 5. In Vivo Assessment of RNAi Agents Targeting SOD1 in G93A-SOD1 Transgenic Rats

[0999] Based on the in vitro and in vivo studies above, three duplexes, AD-1395762, AD-1395756, and AD-1395731 were selected for further analysis (see, e.g., Table 21). FIG. 3A summarizes the effects of these three duplexes observed in vitro, demonstrating that all three duplexes reduce human SOD1 (hSOD1) mRNA expression by greater than 90% in BE(2)c cells on Day 14 post-dose across all doses tested (50 nM, 10 nM, 1 nM, and 0.1 nM).

[1000] These three duplexes were further assessed for in vivo activity in G93A rats. This transgenic rat model, which over-expresses the mutant hSOD1G93A gene, reproduces the pathology and symptoms observed in ALS patients, e.g., paralysis in one or more limbs within a few weeks of age (see, e.g., Matsumoto A, et al. (2006) J Neurosc Res 83: 119-133).

[1001] Briefly, male G93A-SOD1 rats received a single 0.9 mg dose in a volume of 5 μl of AD-1395762, AD-1395756, or AD-1395731, or 5 μl of artificial CSF (aCSF) control (n=3 per group) by intrathecal injection using using a Hamilton syringe and an angled 30 G needle at Day 0. At Day 14 post-dose, animals were sacrificed and tissue samples, including limbar, thoracic and cervical spinal cord, were collected and flash frozen. mRNA was extracted from the tissue and analyzed by the RT-QPCR method.

[1002] The results, depicted in FIG. 3B, demonstrate that all three duplexes reduce target SOD1 (hSOD1) mRNA expression by greater than 90% in G93A rats on Day 14 post-dose in all three regions of the spinal cord (lumbar, thoracic, and cervical) following a single 0.9 mg intrathecally administered dose of the duplex.

### Example 6. Preclinical Assessment of RNAi Agents Targeting SOD1

[1003] Metabolite Identification (MetID) was used to determine which metabolites and the amount of metabolites that were formed following administration of each of duplexes AD-1395762, AD-1395756, and AD-1395731, as well as the percent of parent duplex exposure (area under the curve (AUC)) in the brain and spine of treated wild-type rats.

[1004] Metabolite identification was performed on pooled rat cerebral cortex collected 4-1344 hr post-dose, and pooled lumbar spinal cord collected 4-1344 hr post-dose via LC-HRMS (see, e.g., methods in Liu et al., Bioanalysis (2019) 11(21), 1967-1981).

[1005] The results of these studies are presented in FIGS. 4-5.

[1006] FIGS. 4A and 4B demonstrate that all three duplexes AD-1395762, AD-1395756, and AD-1395731, have similar exposure in rat spine (cervical, thoracic and lumbar; FIG. 4A) and brain (cerebral cortex and brainstem; FIG. 4B).

[1007] FIG. 4C demonstrates that all three duplexes AD-1395762, AD-1395756, and AD-1395731, have similar retention in rat spine (cervical, thoracic and lumbar; FIG. 4A) and brain (cerebral cortex and brainstem; FIG. 4B).

[1008] In addition, it was determined that the half-life (t_{1/2}) of each of these three duplexes is long (>20 days) and that the t_{1/2} are comparable even when considering potential inter-animal dosing variability.

[1009] FIG. 5 demonstrates that all three duplexes AD-1395762, AD-1395756, and AD-1395731, have similar metabolite profiles in both brain and spine and that the antisense strand lacking the 3′-terminal nucleotide (3′N-1 AS) is the major active metabolite.

[1010] FIG. 6 is a Table summarizing the tissue exposure and metabolite profiling of duplexes AD-1395762, AD-1395756, and AD-1395731. Table 23 shows the nucleotide sequences for exemplary observed or predicted 3′N-1 AS metabolites for certain duplexes described herein.

TABLE 23
3′N-1 AS Metabolites.

| Duplex | | SEQ ID | | SEQ ID | | SEQ ID |
|---|---|---|---|---|---|---|
| Name | Sense Sequence 5′ to 3′ | NO: | Antisense Sequence 5′ to 3′ | NO: | Antisense 3′N-1 Metabolite | NO: |
| AD-1395762 | csascuu(Uhd)aaUfCfCfucuauccasgsa | 11 | VPusdCsugdGadTagagdGaUfuaaagugsasg | 12 | VPusdCsugdGadTagagdGaUfuaaagugsa | 1369 |
| AD-1395756 | csasggu(Chd)cuCfAfCfuuuaauccsusa | 13 | VPusdAsggdAudTaaagdTgAfggaccugscsg | 14 | VPusdAsggdAudTaaagdTgAfggaccugsc | 1370 |
| AD-1395731 | ususcgag(Chd)aGfAfAfggaaaguasasa | 15 | VPusUfsuadCu(Tgn)uccuucUfgCfucgaasasu | 16 | VPusUfsuadCu(Tgn)uccuucUfgCfucgaasa | 1371 |
| AD-1395743 | gsasaag(Uhd)aaUfGfGfaccagugasasa | 17 | VPusUfsucdAc(Tgn)gguccaUfuAfcuuucscsu | 18 | VPusUfsucdAc(Tgn)gguccaUfuAfcuuucsc | 1372 |
| AD-1395771 | asgsga(Uhd)gaaGfAfGfaggcaugususa | 19 | VPusAfsacdAu(G2p)ccucucUfuCfauccususu | 20 | VPusAfsacdAu(G2p)ccucucUfuCfauccusu | 1373 |
| AD-1395738 | asasgga(Ahd)agUfAfAfuggaccagsusa | 21 | VPusdAscudGg(Tgn)ccaudTaCfuuuccuuscsu | 22 | VPusdAscudGg(Tgn)ccaudTaCfuuuccuusc | 1374 |
| AD-1395718 | asuscaa(Uhd)uuCfGfAfgcagaaggsasa | 23 | VPusUfsccdTu(C2p)ugcucgAfaAfuugausgsg | 24 | VPusUfsccdTu(C2p)ugcucgAfaAfuugausg | 1375 |
| AD-1395760 | cscsuca(Chd)uuUfAfAfuccucuauscsa | 25 | VPusdGsaudAg(Agn)ggaudTaAfagugaggsasc | 26 | VPusdGsaudAg(Agn)ggaudTaAfagugaggsa | 1376 |
| AD-1395764 | asasgga(Uhd)gaAfGfAfgaggcaugsusa | 27 | VPusAfscadTg(C2p)cucucuUfcAfuccuususg | 28 | VPusAfscadTg(C2p)cucucuUfcAfuccuusu | 1377 |
| AD-1395724 | asasuuu(Chd)gaGfCfAfgaaggaaasgsa | 29 | VPusCfsuudTc(C2p)uucugcUfcGfaaauusgsg | 30 | VPusCfsuudTc(C2p)uucugcUfcGfaaauusg | 1378 |

### Example 7. In Vivo Assessment of RNAi Agents in Non-Human Primates (NHP)

[1011] The effects of duplexes AD-1395762, AD-1395756, and AD-1395731 were also assessed in vivo in non-human primates (NHP).

[1012] As depicted in FIG. 7, on Day 0 non-human primates were intrathecally administered a single 70 mg dose of AD-1395762, AD-1395756, or AD-1395731 in a volume of 2 mL, or a single 120 mg dose of AD-1395731 in a volume of 2 mL, or 2 mL of artificial cerebrospinal fluid (aCSF). Animals were sacrificed at Day 31, Day 85, or Day 169 post-dose, tissue samples were collected and the level of SOD1 mRNA was quantified as described above.

[1013] Due to differences in dosing of the animals (FIG. 8A), the relative potencies of each duplex was unclear. However, by removing samples having drug exposure levels at 24 hours in the CSF that were lower than 1500 ng/ml, which are considered suboptimal doses, the data demonstrate that a single intrathecally administered 70 mg dose of AD-1395762, AD-1395756, or AD-1395731 resulted in the reduction of SOD1 mRNA in various CNS tissues and that the reduction in SOD1 mRNA in various CNS tissues was durable and maintained out to Day 85 post-dose (FIG. 8B). Remarkably, as depicted in FIG. 8C, a single intrathecally administered 70 mg dose of AD-1395762, AD-1395756, or AD-1395731 reduced SOD1 mRNA by 75% in the cervical spinal cord at Day 85 post-dose and by 60% in the cortex by Day 85 post-dose (FIG. 8C).

[1014] In addition, as depicted in FIGS. 9A-9C, a single intrathecally administered 70 mg dose of AD-1395762, AD-1395756, or AD-1395731 resulted in the reduction of SOD1 protein in CSF samples by 60% out to Day 85 post-dose and, in three animals that were extended in the study, a single intrathecally administered 70 mg dose of AD-1395762, AD-1395756, or AD-1395731 resulted in the reduction of SOD1 protein in CSF samples by 60% out to Day 141 post-dose.

[1015] As depicted in FIG. 10, the observed reductions in mRNA levels and protein levels in pre-frontal cortex samples and thoracic spinal cord samples are highly and significantly correlated in NHP. FIG. 13 shows that there was no substantial knockdown of SOD1 in kidney and liver at days 31 and 85 post-intrathecal administration of the three tested duplexes. Additionally, no significant differences were seen in the minimal effects at the kidney and liver among the duplexes.

[1016] FIG. 11A depicts a set of graphs showing the mRNA remaining versus siRNA exposure in tissues that were examined following intrathecal administration of a single 70 mg dose of AD-1395762, AD-1395756, or AD-1395731. Analysis of the data demonstrated that there is a strong correlation between both mRNA and protein reduction to the amount of siRNA exposure in both prefrontal cortex and thoracic spinal cord samples following a single intrathecally administered 70 mg dose of AD-1395762, AD-1395756, or AD-1395731 (FIG. 11B).

1. A double stranded ribonucleic acid (dsRNA) agent, or a pharmaceutically acceptable salt thereof, comprising a sense strand and an antisense strand forming a double stranded region, wherein
a) the nucleotide sequence of the sense strand differs by no more than 4 bases from the nucleotide sequence 5′-csascuu(Uhd)aaUfCfCfucuauccasgsa-3′ (SEQ ID NO: 11) and the nucleotide sequence of the antisense strand differs by no more than 4 bases from the nucleotide sequence 5′-VPusdCsugdGadTagagdGaUfuaaagugsasg-3′ (SEQ ID NO: 12);
b) the nucleotide sequence of the sense strand differs by no more than 4 bases from the nucleotide sequence 5′-csasggu(Chd)cuCfAfCfuuuaauccsusa-3′ (SEQ ID NO: 13) and the nucleotide sequence of the antisense strand differs by no more than 4 bases from the nucleotide sequence 5′-VPusdAsggdAudTaaagdTgAfggaccugscsg-3′ (SEQ ID NO: 14);
c) the nucleotide sequence of the sense strand differs by no more than 4 bases from the nucleotide sequence 5′-ususcgag(Chd)aGfAfAfggaaaguasasa-3′ (SEQ ID NO: 15) and the nucleotide sequence of the antisense strand differs by no more than 4 bases from the nucleotide sequence 5′-VPusUfsuadCu(Tgn)uccuucUfgCfucgaasasu-3′ (SEQ ID NO: 16);
d) the nucleotide sequence of the sense strand differs by no more than 4 bases from the nucleotide sequence 5′-gsasaag(Uhd)aaUfGfGfaccagugasasa-3′ (SEQ ID NO: 17) and the nucleotide sequence of the antisense strand differs by no more than 4 bases from the nucleotide sequence 5′-VPusUfsucdAc(Tgn)gguccaUfuAfcuuucscsu-3′ (SEQ ID NO: 18);
e) the nucleotide sequence of the sense strand differs by no more than 4 bases from the nucleotide sequence 5′-asgsga(Uhd)gaaGfAfGfaggcaugususa-3′ (SEQ ID NO: 19) and the nucleotide sequence of the antisense strand differs by no more than 4 bases from the nucleotide sequence 5′-VPusAfsacdAu(G2p)ccucucUfuCfauccususu-3′ (SEQ ID NO: 20);
f) the nucleotide sequence of the sense strand differs by no more than 4 bases from the nucleotide sequence 5′-asasgga(Ahd)agUfAfAfuggaccagsusa-3′ (SEQ ID NO: 21) and the nucleotide sequence of the antisense strand differs by no more than 4 bases from the nucleotide sequence 5′-VPusdAscudGg(Tgn)ccaudTaCfuuuccuuscsu-3′ (SEQ ID NO: 22);
g) the nucleotide sequence of the sense strand differs by no more than 4 bases from the nucleotide sequence 5′-asuscaa(Uhd)uuCfGfAfgcagaaggsasa-3′ (SEQ ID NO: 23) and the nucleotide sequence of the antisense strand differs by no more than 4 bases from the nucleotide sequence 5′-VPusUfsccdTu(C2p)ugcucgAfaAfuugausgsg-3′ (SEQ ID NO: 24);
h) the nucleotide sequence of the sense strand differs by no more than 4 bases from the nucleotide sequence 5′-cscsuca(Chd)uuUfAfAfuccucuauscsa-3′ (SEQ ID NO: 25) and the nucleotide sequence of the antisense strand differs by no more than 4 bases from the nucleotide sequence 5′-VPusdGsaudAg(Agn)ggaudTaAfagugaggsasc-3′ (SEQ ID NO: 26);
i) the nucleotide sequence of the sense strand differs by no more than 4 bases from the nucleotide sequence 5′-asasgga(Uhd)gaAfGfAfgaggcaugsusa-3′ (SEQ ID NO: 27) and the nucleotide sequence of the antisense strand differs by no more than 4 bases from the nucleotide sequence 5′-VPusAfscadTg(C2p)cucucuUfcAfuccuususg-3′ (SEQ ID NO: 28); or
j) the nucleotide sequence of the sense strand differs by no more than 4 bases from the nucleotide sequence 5′-asasuuu(Chd)gaGfCfAfgaaggaaasgsa-3′ (SEQ ID NO: 29) and the nucleotide sequence of the antisense strand differs by no more than 4 bases from the nucleotide sequence 5′-VPusCfsuudTc(C2p)uucugcUfcGfaaauusgsg-3′ (SEQ ID NO: 30),
wherein
VP is a 5′-vinyl phosphonate;
(Ahd) is 2′-O-hexadecyl-adenosine-3′-phosphate;
(Chd) is 2′-O-hexadecyl-cytidine-3′-phosphate;
(Uhd) is 2′-O-hexadecyl-uridine-3′-phosphate;
(Agn) is adenosine-glycol nucleic acid (GNA), S-isomer;
(Tgn) is thymidine-glycol nucleic acid (GNA), S-Isomer;
(C2p) is cytidine-2′-phosphate;
(G2p) is guanosine-2′-phosphate;
s is a phosphorothioate linkage;
a, g, c and u are 2′-O-methyl (2′-OMe) A, G, C, and U;
dA, dC, dG, and dT are 2′-deoxy A, C, G, and T; and
Af, Cf, Gf, and Uf are 2′-deoxy-2′-fluoro (2′-F) A, C, G, and U.

2.-6. (canceled)

7. The dsRNA agent of claim 1 that is a sodium salt.

8. A double stranded ribonucleic acid (dsRNA) agent for inhibiting expression of superoxide dismutase 1 (SOD1), wherein the dsRNA agent comprises a sense strand and an antisense strand forming a double stranded region, wherein the sense strand comprises at least 15 contiguous nucleotides from any one of the nucleotide sequences of nucleotides 201-223, 204-226, 207-229, 216-238, 219-241, 328-350, 333-355, 336-358, 372-394, or 373-395 of SEQ ID NO: 1, and the antisense strand comprises at least 15 contiguous nucleotides from the corresponding nucleotide sequence of SEQ ID NO: 2, wherein
(i) the dsRNA agent comprises at least one modified nucleotide,
(ii) the double stranded region is 15-30 nucleotide pairs in length, and
(iii) the sense strand or the antisense strand is conjugated to one or more lipophilic moieties.

9.-15. (canceled)

16. The dsRNA agent of claim 8, wherein all of the nucleotides of the sense strand and all of the nucleotides of the antisense strand comprise a nucleotide modification.

17. The dsRNA agent of claim 8, wherein at least one of the nucleotide modifications is selected from the group a deoxy-nucleotide, a 3′-terminal deoxythimidine (dT) nucleotide, a 2′-O-methyl modified nucleotide, a 2′-fluoro modified nucleotide, a 2′-deoxy-modified nucleotide, a 2′-5′-linked ribonucleotide (3′-RNA), a locked nucleotide, an unlocked nucleotide, a conformationally restricted nucleotide, a constrained ethyl nucleotide, an abasic nucleotide, a 2′-amino-modified nucleotide, a 2′-O-allyl-modified nucleotide, 2′-C-alkyl-modified nucleotide, a 2′-methoxyethyl modified nucleotide, a 2′-O-alkyl-modified nucleotide, a morpholino nucleotide, a phosphoramidate, a non-natural base comprising nucleotide, a tetrahydropyran modified nucleotide, a 1,5-anhydrohexitol modified nucleotide, a cyclohexenyl modified nucleotide, a nucleotide comprising a 5′-phosphorothioate group, a nucleotide comprising a 5′-methylphosphonate group, a nucleotide comprising a 5′ phosphate or 5′ phosphate mimic, a nucleotide comprising vinyl phosphonate, a glycol nucleic acid (GNA), a glycol nucleic acid S-Isomer (S-GNA), a nucleotide comprising 2-hydroxymethyl-tetrahydrofuran-5-phosphate, a nucleotide comprising 2′-deoxythymidine-3′phosphate, a nucleotide comprising 2′-deoxyguanosine-3′-phosphate, and a terminal nucleotide linked to a cholesteryl derivative and a dodecanoic acid bisdecylamide group; and combinations thereof.

18. (canceled)

19. (canceled)

20. The dsRNA agent of claim 8, further comprising at least one phosphorothioate internucleotide linkage.

21. (canceled)

22. The dsRNA agent of claim 8, wherein at least one strand comprises a 3′ overhang of at least 1 nucleotide; or a 3′ overhang of 2 nucleotides.

23. (canceled)

24. The dsRNA agent of claim 8, wherein the double stranded region is 17-23 nucleotide pairs in length.

25. (canceled)

26. (canceled)

27. The dsRNA agent of claim 8, wherein each strand is 19-30 nucleotides in length.

28. The dsRNA agent of claim 8, wherein the one or more lipophilic moieties are conjugated to one or more internal positions on at least one strand.

29. The dsRNA agent of claim 28, wherein one lipophilic moiety is conjugated an internal position selected from the group consisting of positions 4-8 and 13-18 on the sense strand, and positions 6-10 and 15-18 on the antisense strand, counting from the 5′end of each strand.

30.-33. (canceled)

34. The dsRNA agent of claim 28, wherein the lipophilic moiety contains a saturated or unsaturated C4-C30 hydrocarbon chain, and an optional functional group selected from the group consisting of hydroxyl, amine, carboxylic acid, sulfonate, phosphate, thiol, azide, and alkyne.

35.-37. (canceled)

38. The dsRNA agent of claim 8, wherein the agent further comprises a phosphate or phosphate mimic at the 5′-end of the antisense strand.

39.-42. (canceled)

43. An isolated cell containing the dsRNA agent of claim 1.

44. A pharmaceutical composition comprising the dsRNA agent of a claim 1 and a pharmaceutically acceptable diluent.

45. A method of inhibiting expression of a SOD1 gene in a cell, the method comprising:
(a) contacting the cell with the dsRNA agent of claim 1; and
(b) maintaining the cell produced in step (a) for a time sufficient to obtain degradation of the mRNA transcript of the SOD1 gene, thereby inhibiting expression of the SOD1 gene in the cell.

46.-48. (canceled)

49. A method of treating a subject diagnosed with an SOD1-associated neurodegenerative disease, the method comprising administering to the subject a therapeutically effective amount of the dsRNA agent of claim 1, thereby treating the subject.

50.-53. (canceled)

54. The method of claim 49, wherein the subject is human.

55. (canceled)

56. The method of claim 49, wherein the SOD1-associated neurodegenerative disease is selected from the group consisting of Amyotrophic Lateral Sclerosis (ALS), Alzheimer's disease (AD), Parkinson's disease (PD), and Down's syndrome (DS).

57. The method of claim 49, wherein the dsRNA agent is administered to the subject intrathecally or intracerebroventricularly.

The application's sequence listing, which the Patent Office published only in electronic form, follows.

SEQUENCE LISTING (1378 sequences)

SEQ ID NO: 1 - DNA, 981 bp, Homo sapiens
  source 1..981: mol_type = genomic DNA
gtttggggccagagtgggcgaggcgcggaggtctggcctataaagtagtcgcggagacggggtgctggtttgcgtcgtagtctcctgcagcgtctggggtttccgttgcagtcctcggaaccaggacctcggcgtggcctagcgagttatggcgacgaaggccgtgtgcgtgctgaagggcgacggcccagtgcagggcatcatcaatttcgagcagaaggaaagtaatggaccagtgaaggtgtggggaagcattaaaggactgactgaaggcctgcatggattccatgttcatgagtttggagataatacagcaggctgtaccagtgcaggtcctcactttaatcctctatccagaaaacacggtgggccaaaggatgaagagaggcatgttggagacttgggcaatgtgactgctgacaaagatggtgtggccgatgtgtctattgaagattctgtgatctcactctcaggagaccattgcatcattggccgcacactggtggtccatgaaaaagcagatgacttgggcaaaggtggaaatgaagaaagtacaaagacaggaaacgctggaagtcgtttggcttgtggtgtaattgggatcgcccaataaacattcccttggatgtagtctgaggccccttaactcatctgttatcctgctagctgtagaaatgtatcctgataaacattaaacactgtaatcttaaaagtgtaattgtgtgactttttcagagttgctttaaagtacctgtagtgagaaactgatttatgatcacttggaagatttgtatagttttataaaactcagttaaaatgtctgtttcaatgacctgtattttgccagacttaaatcacagatgggtattaaacttgtcagaatttctttgtcattcaagcctgtgaataaaaaccctgtatggcacttattatgaggctattaaaagaatccaaattcaaactaaaaaaaaaaaaaaaaaa

SEQ ID NO: 2 - DNA, 981 bp, Homo sapiens
  source 1..981: mol_type = genomic DNA
ttttttttttttttttttagtttgaatttggattcttttaatagcctcataataagtgccatacagggtttttattcacaggcttgaatgacaaagaaattctgacaagtttaatacccatctgtgatttaagtctggcaaaatacaggtcattgaaacagacattttaactgagttttataaaactatacaaatcttccaagtgatcataaatcagtttctcactacaggtactttaaagcaactctgaaaaagtcacacaattacacttttaagattacagtgtttaatgtttatcaggatacatttctacagctagcaggataacagatgagttaaggggcctcagactacatccaagggaatgtttattgggcgatcccaattacaccacaagccaaacgacttccagcgtttcctgtctttgtactttcttcatttccacctttgcccaagtcatctgctttttcatggaccaccagtgtgcggccaatgatgcaatggtctcctgagagtgagatcacagaatcttcaatagacacatcggccacaccatctttgtcagcagtcacattgcccaagtctccaacatgcctctcttcatcctttggcccaccgtgttttctggatagaggattaaagtgaggacctgcactggtacagcctgctgtattatctccaaactcatgaacatggaatccatgcaggccttcagtcagtcctttaatgcttccccacaccttcactggtccattactttccttctgctcgaaattgatgatgccctgcactgggccgtcgcccttcagcacgcacacggccttcgtcgccataactcgctaggccacgccgaggtcctggttccgaggactgcaacggaaaccccagacgctgcaggagactacgacgcaaaccagcaccccgtctccgcgactactttataggccagacctccgcgcctcgcccactctggccccaaac

SEQ ID NO: 3 - DNA, 661 bp, Mus musculus
  source 1..661: mol_type = genomic DNA
gccagggcctcgtttttttgcgcggtcctttcctgcggcgccttccgtccgtcggcttctcgtcttgctctctctggtccctccggaggaggccgccgcgcgtctcccggggaagcatggcgatgaaagcggtgtgcgtgctgaagggcgacggtccggtgcagggaaccatccacttcgagcagaaggcaagcggtgaaccagttgtgttgtcaggacaaattacaggattaactgaaggccagcatgggttccacgtccatcagtatggggacaatacacaaggctgtaccagtgcaggacctcattttaatcctcactctaagaaacatggtggcccggcggatgaagagaggcatgttggagacctgggcaatgtgactgctggaaaggacggtgtggccaatgtgtccattgaagatcgtgtgatctcactctcaggagagcattccatcattggccgtacaatggtggtccatgagaaacaagatgacttgggcaaaggtggaaatgaagaaagtacaaagactggaaatgctgggagccgcttggcctgtggagtgattgggattgcgcagtaaacattccctgtgtggtctgagtctcagactcatctgctaccctcaaaccattaaactgtaatctgaaaaaaaaaaaaaaa

SEQ ID NO: 4 - DNA, 661 bp, Mus musculus
  source 1..661: mol_type = genomic DNA
tttttttttttttttcagattacagtttaatggtttgagggtagcagatgagtctgagactcagaccacacagggaatgtttactgcgcaatcccaatcactccacaggccaagcggctcccagcatttccagtctttgtactttcttcatttccacctttgcccaagtcatcttgtttctcatggaccaccattgtacggccaatgatggaatgctctcctgagagtgagatcacacgatcttcaatggacacattggccacaccgtcctttccagcagtcacattgcccaggtctccaacatgcctctcttcatccgccgggccaccatgtttcttagagtgaggattaaaatgaggtcctgcactggtacagccttgtgtattgtccccatactgatggacgtggaacccatgctggccttcagttaatcctgtaatttgtcctgacaacacaactggttcaccgcttgccttctgctcgaagtggatggttccctgcaccggaccgtcgcccttcagcacgcacaccgctttcatcgccatgcttccccgggagacgcgcggcggcctcctccggagggaccagagagagcaagacgagaagccgacggacggaaggcgccgcaggaaaggaccgcgcaaaaaaacgaggccctggc

SEQ ID NO: 5 - DNA, 465 bp, Macaca fascicularis
  source 1..465: mol_type = genomic DNA
atggcgatgaaggccgtgtgcgtgttgaagggcgacagcccagtgcagggcaccatcaatttcgagcagaaggaaagtaatggaccagtgaaggtgtggggaagcattacaggattgactgaaggcctgcatggattccatgttcatcagtttggagataatacacaaggctgtaccagtgcaggtcctcactttaatcctctatccagacaacacggtgggccaaaggatgaagagaggcatgttggagacctgggcaatgtgactgctggcaaagatggtgtggccaaggtgtctttcgaagattctgtgatctcgctctcaggagaccattccatcattggccgcacattggtggtccatgaaaaagcagatgacttgggcaaaggtggaaatgaagaaagtaaaaagacaggaaacgctggaggtcgtctggcttgtggtgtaattgggatcgcccaataa

SEQ ID NO: 6 - DNA, 465 bp, Macaca fascicularis
  source 1..465: mol_type = genomic DNA
ttattgggcgatcccaattacaccacaagccagacgacctccagcgtttcctgtctttttactttcttcatttccacctttgcccaagtcatctgctttttcatggaccaccaatgtgcggccaatgatggaatggtctcctgagagcgagatcacagaatcttcgaaagacaccttggccacaccatctttgccagcagtcacattgcccaggtctccaacatgcctctcttcatcctttggcccaccgtgttgtctggatagaggattaaagtgaggacctgcactggtacagccttgtgtattatctccaaactgatgaacatggaatccatgcaggccttcagtcaatcctgtaatgcttccccacaccttcactggtccattactttccttctgctcgaaattgatggtgccctgcactgggctgtcgcccttcaacacgcacacggccttcatcgccat

SEQ ID NO: 7 - DNA, 474 bp, Canis lupus
  variation 165: note = a, c, t, g, unknown or other
  source 1..474: mol_type = genomic DNA
cgagtcatggagatgaaggccgtgtgcgtgttgaagggccagggcccggtggagggcaccatccacttcgtgcagaagggaagtgggcctgttgtggtatcaggaaccattacagggctgactgaaggcgagcatggattccacgtccatcagtttgaagataanacacaaggctgtactagtgcaggtcctcactttaatcctctgtccaaaaaacatggtgggccaaaagatcaagagaggcatgttggagacctgggcaatgtgactgctggcaaggatggcgtggccattgtgtccatagaagattctctgattgcactctcaggagactattccatcattggccgcaccatggtggtccacgagaaacgagatgacttgggcaaaggtgacaatgaagaaagtacacagacaggaaacgccgggagtcgtttggcttgtggtgtcattgggatcgcccaataaacattc

SEQ ID NO: 8 - DNA, 474 bp, Canis lupus
  variation 310: note = a, c, t, g, unknown or other
  source 1..474: mol_type = genomic DNA
gaatgtttattgggcgatcccaatgacaccacaagccaaacgactcccggcgtttcctgtctgtgtactttcttcattgtcacctttgcccaagtcatctcgtttctcgtggaccaccatggtgcggccaatgatggaatagtctcctgagagtgcaatcagagaatcttctatggacacaatggccacgccatccttgccagcagtcacattgcccaggtctccaacatgcctctcttgatcttttggcccaccatgttttttggacagaggattaaagtgaggacctgcactagtacagccttgtgtnttatcttcaaactgatggacgtggaatccatgctcgccttcagtcagccctgtaatggttcctgataccacaacaggcccacttcccttctgcacgaagtggatggtgccctccaccgggccctggcccttcaacacgcacacggccttcatctccatgactcg

SEQ ID NO: 9 - DNA, 650 bp, Rattus norvegicus
  source 1..650: mol_type = genomic DNA
gttttgcaccttcgtttcctgcggcggcttctgtcgtctccttgctttttgctctcccaggttccgaggccgccgcgcgtctcccggggaagcatggcgatgaaggccgtgtgcgtgctgaagggcgacggtccggtgcagggcgtcattcacttcgagcagaaggcaagcggtgaaccagttgtggtgtcaggacagattacaggattaactgaaggcgagcatgggttccatgtccatcaatatggggacaatacacaaggctgtaccactgcaggacctcattttaatcctcactctaagaaacatggcggtccagcggatgaagagaggcatgttggagacctgggcaatgtggctgctggaaaggacggtgtggccaatgtgtccattgaagatcgtgtgatctcactctcaggagagcattccatcattggccgtactatggtggtccacgagaaacaagatgacttgggcaaaggtggaaatgaagaaagtacaaagactggaaatgctggaagccgcttggcttgtggtgtgattgggattgcccaataaacattccctatgtggtctgagtctcagactcatctgctgtcctgctaaactgtagaaaaaaaccaaaccattaaactgtaatcttaacagtt

SEQ ID NO: 10 - DNA, 650 bp, Rattus norvegicus
  source 1..650: mol_type = genomic DNA
aactgttaagattacagtttaatggtttggtttttttctacagtttagcaggacagcagatgagtctgagactcagaccacatagggaatgtttattgggcaatcccaatcacaccacaagccaagcggcttccagcatttccagtctttgtactttcttcatttccacctttgcccaagtcatcttgtttctcgtggaccaccatagtacggccaatgatggaatgctctcctgagagtgagatcacacgatcttcaatggacacattggccacaccgtcctttccagcagccacattgcccaggtctccaacatgcctctcttcatccgctggaccgccatgtttcttagagtgaggattaaaatgaggtcctgcagtggtacagccttgtgtattgtccccatattgatggacatggaacccatgctcgccttcagttaatcctgtaatctgtcctgacaccacaactggttcaccgcttgccttctgctcgaagtgaatgacgccctgcaccggaccgtcgcccttcagcacgcacacggccttcatcgccatgcttccccgggagacgcgcggcggcctcggaacctgggagagcaaaaagcaaggagacgacagaagccgccgcaggaaacgaaggtgcaaaac

SEQ ID NO: 11 - RNA, 21 nt, synthetic construct
  source 1..21: mol_type = other RNA
  modified_base 1: mod_base = OTHER; note = 2'-O-methylcytidine-3'-phosphorothioate
  modified_base 2: mod_base = OTHER; note = 2'-O-methyladenosine-3'-phosphorothioate
  modified_base 3: mod_base = OTHER; note = 2'-O-methylcytidine-3'-phosphate
  modified_base 4: mod_base = OTHER; note = 2'-O-methyluridine-3'-phosphate
  modified_base 5: mod_base = OTHER; note = 2'-O-methyluridine-3'-phosphate
  modified_base 6: mod_base = OTHER; note = 2'-O-hexadecyl-uridine-3'-phosphate
  modified_base 7: mod_base = OTHER; note = 2'-O-methyladenosine-3'-phosphate
  modified_base 8: mod_base = OTHER; note = 2'-O-methyladenosine-3'-phosphate
  modified_base 9: mod_base = OTHER; note = 2'-deoxy-2'-fluorouridine-3'-phosphate
  modified_base 10: mod_base = OTHER; note = 2'-deoxy-2'-fluorocytidine-3'-phosphate
  modified_base 11: mod_base = OTHER; note = 2'-deoxy-2'-fluorocytidine-3'-phosphate
  modified_base 12: mod_base = OTHER; note = 2'-O-methyluridine-3'-phosphate
  modified_base 13: mod_base = OTHER; note = 2'-O-methylcytidine-3'-phosphate
  modified_base 14: mod_base = OTHER; note = 2'-O-methyluridine-3'-phosphate
  modified_base 15: mod_base = OTHER; note = 2'-O-methyladenosine-3'-phosphate
  modified_base 16: mod_base = OTHER; note = 2'-O-methyluridine-3'-phosphate
  modified_base 17: mod_base = OTHER; note = 2'-O-methylcytidine-3'-phosphate
  modified_base 18: mod_base = OTHER; note = 2'-O-methylcytidine-3'-phosphate
  modified_base 19: mod_base = OTHER; note = 2'-O-methyladenosine-3'-phosphorothioate
  modified_base 20: mod_base = OTHER; note = 2'-O-methylguanosine-3'-phosphorothioate
  modified_base 21: mod_base = OTHER; note = 2'-O-methyladenosine
cactttaatcctctatccaga

SEQ ID NO: 12 - DNA, 23 bp, synthetic construct
  source 1..23: mol_type = other DNA
  modified_base 1: mod_base = OTHER; note = 2'-O-methyluridine-3'-phosphorothioate 5'-(E)-Vinylphosphonate
  modified_base 2: mod_base = OTHER; note = 2'-deoxycytidine-3'-phosphorothioate
  modified_base 3: mod_base = OTHER; note = 2'-O-methyluridine-3'-phosphate
  modified_base 4: mod_base = OTHER; note = 2'-O-methylguanosine-3'-phosphate
  modified_base 6: mod_base = OTHER; note = 2'-O-methyladenosine-3'-phosphate
  modified_base 8: mod_base = OTHER; note = 2'-O-methyladenosine-3'-phosphate
  modified_base 9: mod_base = OTHER; note = 2'-O-methylguanosine-3'-phosphate
  modified_base 10: mod_base = OTHER; note = 2'-O-methyladenosine-3'-phosphate
  modified_base 11: mod_base = OTHER; note = 2'-O-methylguanosine-3'-phosphate
  modified_base 13: mod_base = OTHER; note = 2'-O-methyladenosine-3'-phosphate
  modified_base 14: mod_base = OTHER; note = 2'-deoxy-2'-fluorouridine-3'-phosphate
  modified_base 15: mod_base = OTHER; note = 2'-O-methyluridine-3'-phosphate
  modified_base 16: mod_base = OTHER; note = 2'-O-methyladenosine-3'-phosphate
  modified_base 17: mod_base = OTHER; note = 2'-O-methyladenosine-3'-phosphate
  modified_base 18: mod_base = OTHER; note = 2'-O-methyladenosine-3'-phosphate
  modified_base 19: mod_base = OTHER; note = 2'-O-methylguanosine-3'-phosphate
  modified_base 20: mod_base = OTHER; note = 2'-O-methyluridine-3'-phosphate
  modified_base 21: mod_base = OTHER; note = 2'-O-methylguanosine-3'-phosphorothioate
  modified_base 22: mod_base = OTHER; note = 2'-O-methyladenosine-3'-phosphorothioate
  modified_base 23: mod_base = OTHER; note = 2'-O-methylguanosine
  misc_feature 1: note = RNA
  misc_feature 3..4: note = RNA
  misc_feature 6: note = RNA
  misc_feature 8..11: note = RNA
  misc_feature 13..23: note = RNA
  misc_feature 2: note = DNA
  misc_feature 5: note = DNA
  misc_feature 7: note = DNA
  misc_feature 12: note = DNA
tctggatagaggattaaagtgag

SEQ ID NO: 13 - RNA, 21 nt, synthetic construct
  source 1..21: mol_type = other RNA
  modified_base 1: mod_base = OTHER; note = 2'-O-methylcytidine-3'-phosphorothioate
  modified_base 2: mod_base = OTHER; note = 2'-O-methyladenosine-3'-phosphorothioate
  modified_base 3: mod_base = OTHER; note = 2'-O-methylguanosine-3'-phosphate
  modified_base 4: mod_base = OTHER; note = 2'-O-methylguanosine-3'-phosphate
  modified_base 5: mod_base = OTHER; note = 2'-O-methyluridine-3'-phosphate
  modified_base 6: mod_base = OTHER; note = 2'-O-hexadecyl-cytidine-3'-phosphate
  modified_base 7: mod_base = OTHER; note = 2'-O-methylcytidine-3'-phosphate
  modified_base 8: mod_base = OTHER; note = 2'-O-methyluridine-3'-phosphate
  modified_base 9: mod_base = OTHER; note = 2'-deoxy-2'-fluorocytidine-3'-phosphate
  modified_base 10: mod_base = OTHER; note = 2'-deoxy-2'-fluoroadenosine-3'-phosphate
  modified_base 11: mod_base = OTHER; note = 2'-deoxy-2'-fluorocytidine-3'-phosphate
  modified_base 12: mod_base = OTHER; note = 2'-O-methyluridine-3'-phosphate
  modified_base 13: mod_base = OTHER; note = 2'-O-methyluridine-3'-phosphate
  modified_base 14: mod_base = OTHER; note = 2'-O-methyluridine-3'-phosphate
  modified_base 15: mod_base = OTHER; note = 2'-O-methyladenosine-3'-phosphate
  modified_base 16: mod_base = OTHER; note = 2'-O-methyladenosine-3'-phosphate
  modified_base 17: mod_base = OTHER; note = 2'-O-methyluridine-3'-phosphate
  modified_base 18: mod_base = OTHER; note = 2'-O-methylcytidine-3'-phosphate
  modified_base 19: mod_base = OTHER; note = 2'-O-methylcytidine-3'-phosphorothioate
  modified_base 20: mod_base = OTHER; note = 2'-O-methyluridine-3'-phosphorothioate
  modified_base 21: mod_base = OTHER; note = 2'-O-methyladenosine
caggtcctcactttaatccta

SEQ ID NO: 14 - DNA, 23 bp, synthetic construct
  source 1..23: mol_type = other DNA
  modified_base 1: mod_base = OTHER; note = 2'-O-methyluridine-3'-phosphorothioate 5'-(E)-Vinylphosphonate
  modified_base 2: mod_base = OTHER; note = 2'-deoxyadenosine-3'-phosphorothioate
  modified_base 3: mod_base = OTHER; note = 2'-O-methylguanosine-3'-phosphate
  modified_base 4: mod_base = OTHER; note = 2'-O-methylguanosine-3'-phosphate
  modified_base 6: mod_base = OTHER; note = 2'-O-methyluridine-3'-phosphate
  modified_base 8: mod_base = OTHER; note = 2'-O-methyladenosine-3'-phosphate
  modified_base 9: mod_base = OTHER; note = 2'-O-methyladenosine-3'-phosphate
  modified_base 10: mod_base = OTHER; note = 2'-O-methyladenosine-3'-phosphate
  modified_base 11: mod_base = OTHER; note = 2'-O-methylguanosine-3'-phosphate
  modified_base 13: mod_base = OTHER; note = 2'-O-methylguanosine-3'-phosphate
  modified_base 14: mod_base = OTHER; note = 2'-deoxy-2'-fluoroadenosine-3'-phosphate
  modified_base 15: mod_base = OTHER; note = 2'-O-methylguanosine-3'-phosphate
  modified_base 16: mod_base = OTHER; note = 2'-O-methylguanosine-3'-phosphate
  modified_base 17: mod_base = OTHER; note = 2'-O-methyladenosine-3'-phosphate
  modified_base 18: mod_base = OTHER; note = 2'-O-methylcytidine-3'-phosphate
  modified_base 19: mod_base = OTHER; note = 2'-O-methylcytidine-3'-phosphate
  modified_base 20: mod_base = OTHER; note = 2'-O-methyluridine-3'-phosphate
  modified_base 21: mod_base = OTHER; note = 2'-O-methylguanosine-3'-phosphorothioate
  modified_base 22: mod_base = OTHER; note = 2'-O-methylcytidine-3'-phosphorothioate
  modified_base 23: mod_base = OTHER; note = 2'-O-methylguanosine
  misc_feature 1: note = RNA
  misc_feature 3..4: note = RNA
  misc_feature 6: note = RNA
  misc_feature 8..11: note = RNA
  misc_feature 13..23: note = RNA
  misc_feature 2: note = DNA
  misc_feature 5: note = DNA
  misc_feature 7: note = DNA
  misc_feature 12: note = DNA
taggattaaagtgaggacctgcg

SEQ ID NO: 15 - RNA, 21 nt, synthetic construct
  source 1..21: mol_type = other RNA
  modified_base 1: mod_base = OTHER; note = 2'-O-methyluridine-3'-phosphorothioate
  modified_base 2: mod_base = OTHER; note = 2'-O-methyluridine-3'-phosphorothioate
  modified_base 3: mod_base = OTHER; note = 2'-O-methylcytidine-3'-phosphate
  modified_base 4: mod_base = OTHER; note = 2'-O-methylguanosine-3'-phosphate
  modified_base 5: mod_base = OTHER; note = 2'-O-methyladenosine-3'-phosphate
  modified_base 6: mod_base = OTHER; note = 2'-O-methylguanosine-3'-phosphate
  modified_base 7: mod_base = OTHER; note = 2'-O-hexadecyl-cytidine-3'-phosphate
  modified_base 8: mod_base = OTHER; note = 2'-O-methyladenosine-3'-phosphate
  modified_base 9: mod_base = OTHER; note = 2'-deoxy-2'-fluoroguanosine-3'-phosphate
  modified_base 10: mod_base = OTHER; note = 2'-deoxy-2'-fluoroadenosine-3'-phosphate
  modified_base 11: mod_base = OTHER; note = 2'-deoxy-2'-fluoroadenosine-3'-phosphate
  modified_base 12: mod_base = OTHER; note = 2'-O-methylguanosine-3'-phosphate
  modified_base 13: mod_base = OTHER; note = 2'-O-methylguanosine-3'-phosphate
  modified_base 14: mod_base = OTHER; note = 2'-O-methyladenosine-3'-phosphate
  modified_base 15: mod_base = OTHER; note = 2'-O-methyladenosine-3'-phosphate
  modified_base 16: mod_base = OTHER; note = 2'-O-methyladenosine-3'-phosphate
  modified_base 17: mod_base = OTHER; note = 2'-O-methylguanosine-3'-phosphate
  modified_base 18: mod_base = OTHER; note = 2'-O-methyluridine-3'-phosphate
  modified_base 19: mod_base = OTHER; note = 2'-O-methyladenosine-3'-phosphorothioate
  modified_base 20: mod_base = OTHER; note = 2'-O-methyladenosine-3'-phosphorothioate
  modified_base 21: mod_base = OTHER; note = 2'-O-methyladenosine
ttcgagcagaaggaaagtaaa

SEQ ID NO: 16 - DNA, 23 bp, synthetic construct
  source 1..23: mol_type = other DNA
  modified_base 1: mod_base = OTHER; note = 2'-O-methyluridine-3'-phosphorothioate 5'-(E)-Vinylphosphonate
  modified_base 2: mod_base = OTHER; note = 2'-deoxy-2'-fluorouridine-3'-phosphorothioate
  modified_base 3: mod_base = OTHER; note = 2'-O-methyluridine-3'-phosphate
  modified_base 4: mod_base = OTHER; note = 2'-O-methyladenosine-3'-phosphate
  modified_base 6: mod_base = OTHER; note = 2'-O-methyluridine-3'-phosphate
  modified_base 7: mod_base = OTHER; note = Thymidine-glycol nucleic acid (GNA), S-Isomer
  modified_base 8: mod_base = OTHER; note = 2'-O-methyluridine-3'-phosphate
  modified_base 9: mod_base = OTHER; note = 2'-O-methylcytidine-3'-phosphate
  modified_base 10: mod_base = OTHER; note = 2'-O-methylcytidine-3'-phosphate
  modified_base 11: mod_base = OTHER; note = 2'-O-methyluridine-3'-phosphate
  modified_base 12: mod_base = OTHER; note = 2'-O-methyluridine-3'-phosphate
  modified_base 13: mod_base = OTHER; note = 2'-O-methylcytidine-3'-phosphate
  modified_base 14: mod_base = OTHER; note = 2'-deoxy-2'-fluorouridine-3'-phosphate
  modified_base 15: mod_base = OTHER; note = 2'-O-methylguanosine-3'-phosphate
  modified_base 16: mod_base = OTHER; note = 2'-deoxy-2'-fluorocytidine-3'-phosphate
  modified_base 17: mod_base = OTHER; note = 2'-O-methyluridine-3'-phosphate
  modified_base 18: mod_base = OTHER; note = 2'-O-methylcytidine-3'-phosphate
  modified_base 19: mod_base = OTHER; note = 2'-O-methylguanosine-3'-phosphate
  modified_base 20: mod_base = OTHER; note = 2'-O-methyladenosine-3'-phosphate
  modified_base 21: mod_base = OTHER; note = 2'-O-methyladenosine-3'-phosphorothioate
  modified_base 22: mod_base = OTHER; note = 2'-O-methyladenosine-3'-phosphorothioate
  modified_base 23: mod_base = OTHER; note = 2'-O-methyluridine
  misc_feature 1..4: note = RNA
  misc_feature 6..23: note = RNA
  misc_feature 5: note = DNA
tttactttccttctgctcgaaat

SEQ ID NO: 17 - RNA, 21 nt, synthetic construct
  source 1..21: mol_type = other RNA
  modified_base 1: mod_base = OTHER; note = 2'-O-methylguanosine-3'-phosphorothioate
  modified_base 2: mod_base = OTHER; note = 2'-O-methyladenosine-3'-phosphorothioate
  modified_base 3: mod_base = OTHER; note = 2'-O-methyladenosine-3'-phosphate
  modified_base 4: mod_base = OTHER; note = 2'-O-methyladenosine-3'-phosphate
  modified_base 5: mod_base = OTHER; note = 2'-O-methylguanosine-3'-phosphate
  modified_base 6: mod_base = OTHER; note = 2'-O-hexadecyl-uridine-3'-phosphate
  modified_base 7: mod_base = OTHER; note = 2'-O-methyladenosine-3'-phosphate
  modified_base 8: mod_base = OTHER; note = 2'-O-methyladenosine-3'-phosphate
  modified_base 9: mod_base = OTHER; note = 2'-deoxy-2'-fluorouridine-3'-phosphate
  modified_base 10: mod_base = OTHER; note = 2'-deoxy-2'-fluoroguanosine-3'-phosphate
  modified_base 11: mod_base = OTHER; note = 2'-deoxy-2'-fluoroguanosine-3'-phosphate
  modified_base 12: mod_base = OTHER; note = 2'-O-methyladenosine-3'-phosphate
  modified_base 13: mod_base = OTHER; note = 2'-O-methylcytidine-3'-phosphate
  modified_base 14: mod_base = OTHER; note = 2'-O-methylcytidine-3'-phosphate
  modified_base 15: mod_base = OTHER; note = 2'-O-methyladenosine-3'-phosphate
  modified_base 16: mod_base = OTHER; note = 2'-O-methylguanosine-3'-phosphate
  modified_base 17: mod_base = OTHER; note = 2'-O-methyluridine-3'-phosphate
  modified_base 18: mod_base = OTHER; note = 2'-O-methylguanosine-3'-phosphate
  modified_base 19: mod_base = OTHER; note = 2'-O-methyladenosine-3'-phosphorothioate
  modified_base 20: mod_base = OTHER; note = 2'-O-methyladenosine-3'-phosphorothioate
  modified_base 21: mod_base = OTHER; note = 2'-O-methyladenosine
gaaagtaatggaccagtgaaa

SEQ ID NO: 18 - DNA, 23 bp, synthetic construct
  source 1..23: mol_type = other DNA
  modified_base 1: mod_base = OTHER; note = 2'-O-methyluridine-3'-phosphorothioate 5'-(E)-Vinylphosphonate
  modified_base 2: mod_base = OTHER; note = 2'-deoxy-2'-fluorouridine-3'-phosphorothioate
  modified_base 3: mod_base = OTHER; note = 2'-O-methyluridine-3'-phosphate
  modified_base 4: mod_base = OTHER; note = 2'-O-methylcytidine-3'-phosphate
  modified_base 6: mod_base = OTHER; note = 2'-O-methylcytidine-3'-phosphate
  modified_base 7: mod_base = OTHER; note = Thymidine-glycol nucleic acid (GNA), S-Isomer
  modified_base 8: mod_base = OTHER; note = 2'-O-methylguanosine-3'-phosphate
  modified_base 9: mod_base = OTHER; note = 2'-O-methylguanosine-3'-phosphate
  modified_base 10: mod_base = OTHER; note = 2'-O-methyluridine-3'-phosphate
  modified_base 11: mod_base = OTHER; note = 2'-O-methylcytidine-3'-phosphate
  modified_base 12: mod_base = OTHER; note = 2'-O-methylcytidine-3'-phosphate
  modified_base 13: mod_base = OTHER; note = 2'-O-methyladenosine-3'-phosphate
  modified_base 14: mod_base = OTHER; note = 2'-deoxy-2'-fluorouridine-3'-phosphate
  modified_base 15: mod_base = OTHER; note = 2'-O-methyluridine-3'-phosphate
  modified_base 16: mod_base = OTHER; note = 2'-deoxy-2'-fluoroadenosine-3'-phosphate
  modified_base 17: mod_base = OTHER; note = 2'-O-methylcytidine-3'-phosphate
  modified_base 18: mod_base = OTHER; note = 2'-O-methyluridine-3'-phosphate
  modified_base 19: mod_base = OTHER; note = 2'-O-methyluridine-3'-phosphate
  modified_base 20: mod_base = OTHER; note = 2'-O-methyluridine-3'-phosphate
  modified_base 21: mod_base = OTHER; note = 2'-O-methylcytidine-3'-phosphorothioate
  modified_base 22: mod_base = OTHER; note = 2'-O-methylcytidine-3'-phosphorothioate
  modified_base 23: mod_base = OTHER; note = 2'-O-methyluridine
  misc_feature 1..4: note = RNA
  misc_feature 6..23: note = RNA
  misc_feature 5: note = DNA
tttcactggtccattactttcct

SEQ ID NO: 19 - RNA, 21 nt, synthetic construct
  source 1..21: mol_type = other RNA
  modified_base 1: mod_base = OTHER; note = 2'-O-methyladenosine-3'-phosphorothioate
  modified_base 2: mod_base = OTHER; note = 2'-O-methylguanosine-3'-phosphorothioate
  modified_base 3: mod_base = OTHER; note = 2'-O-methylguanosine-3'-phosphate
  modified_base 4: mod_base = OTHER; note = 2'-O-methyladenosine-3'-phosphate
  modified_base 5: mod_base = OTHER; note = 2'-O-hexadecyl-uridine-3'-phosphate
  modified_base 6: mod_base = OTHER; note = 2'-O-methylguanosine-3'-phosphate
  modified_base 7: mod_base = OTHER; note = 2'-O-methyladenosine-3'-phosphate
  modified_base 8: mod_base = OTHER; note = 2'-O-methyladenosine-3'-phosphate
  modified_base 9: mod_base = OTHER; note = 2'-deoxy-2'-fluoroguanosine-3'-phosphate
  modified_base 10: mod_base = OTHER; note = 2'-deoxy-2'-fluoroadenosine-3'-phosphate
  modified_base 11: mod_base = OTHER; note = 2'-deoxy-2'-fluoroguanosine-3'-phosphate
  modified_base 12: mod_base = OTHER; note = 2'-O-methyladenosine-3'-phosphate
  modified_base 13: mod_base = OTHER; note = 2'-O-methylguanosine-3'-phosphate
  modified_base 14: mod_base = OTHER; note = 2'-O-methylguanosine-3'-phosphate
  modified_base 15: mod_base = OTHER; note = 2'-O-methylcytidine-3'-phosphate
  modified_base 16: mod_base = OTHER; note = 2'-O-methyladenosine-3'-phosphate
  modified_base 17: mod_base = OTHER; note = 2'-O-methyluridine-3'-phosphate
  modified_base 18: mod_base = OTHER; note = 2'-O-methylguanosine-3'-phosphate
  modified_base 19: mod_base = OTHER; note = 2'-O-methyluridine-3'-phosphorothioate
  modified_base 20: mod_base = OTHER; note = 2'-O-methyluridine-3'-phosphorothioate
  modified_base 21: mod_base = OTHER; note = 2'-O-methyladenosine
aggatgaagagaggcatgtta

SEQ ID NO: 20 - DNA, 23 bp, synthetic construct
  source 1..23: mol_type = other DNA
  modified_base 1: mod_base = OTHER; note = 2'-O-methyluridine-3'-phosphorothioate 5'-(E)-Vinylphosphonate
  modified_base 2: mod_base = OTHER; note = 2'-deoxy-2'-fluoroadenosine-3'-phosphorothioate
  modified_base 3: mod_base = OTHER; note = 2'-O-methyladenosine-3'-phosphate
  modified_base 4: mod_base = OTHER; note = 2'-O-methylcytidine-3'-phosphate
  modified_base 6: mod_base = OTHER; note = 2'-O-methyluridine-3'-phosphate
  modified_base 7: mod_base = OTHER; note = guanosine-2'-phosphate
  modified_base 8: mod_base = OTHER; note = 2'-O-methylcytidine-3'-phosphate
  modified_base 9: mod_base = OTHER; note = 2'-O-methylcytidine-3'-phosphate
  modified_base 10: mod_base = OTHER; note = 2'-O-methyluridine-3'-phosphate
  modified_base 11: mod_base = OTHER; note = 2'-O-methylcytidine-3'-phosphate
  modified_base 12: mod_base = OTHER; note = 2'-O-methyluridine-3'-phosphate
  modified_base 13: mod_base = OTHER; note = 2'-O-methylcytidine-3'-phosphate
  modified_base 14: mod_base = OTHER; note = 2'-deoxy-2'-fluorouridine-3'-phosphate
  modified_base 15: mod_base = OTHER; note = 2'-O-methyluridine-3'-phosphate
  modified_base 16: mod_base = OTHER; note = 2'-deoxy-2'-fluorocytidine-3'-phosphate
  modified_base 17: mod_base = OTHER; note = 2'-O-methyladenosine-3'-phosphate
  modified_base 18: mod_base = OTHER; note = 2'-O-methyluridine-3'-phosphate
  modified_base 19: mod_base = OTHER; note = 2'-O-methylcytidine-3'-phosphate
  modified_base 20: mod_base = OTHER; note = 2'-O-methylcytidine-3'-phosphate
  modified_base 21: mod_base = OTHER; note = 2'-O-methyluridine-3'-phosphorothioate
  modified_base 22: mod_base = OTHER; note = 2'-O-methyluridine-3'-phosphorothioate
  modified_base 23: mod_base = OTHER; note = 2'-O-methyluridine
  misc_feature 1..4: note = RNA
  misc_feature 6..23: note = RNA
  misc_feature 5: note = DNA
taacatgcctctcttcatccttt

SEQ ID NO: 21 - RNA, 21 nt, synthetic construct
  source 1..21: mol_type = other RNA
  modified_base 1: mod_base = OTHER; note = 2'-O-methyladenosine-3'-phosphorothioate
  modified_base 2: mod_base = OTHER; note = 2'-O-methyladenosine-3'-phosphorothioate
  modified_base 3: mod_base = OTHER; note = 2'-O-methylguanosine-3'-phosphate
  modified_base 4: mod_base = OTHER; note = 2'-O-methylguanosine-3'-phosphate
  modified_base 5: mod_base = OTHER; note = 2'-O-methyladenosine-3'-phosphate
  modified_base 6: mod_base = OTHER; note = 2'-O-hexadecyl-adenosine-3'-phosphate
  modified_base 7: mod_base = OTHER; note = 2'-O-methyladenosine-3'-phosphate
  modified_base 8: mod_base = OTHER; note = 2'-O-methylguanosine-3'-phosphate
  modified_base 9: mod_base = OTHER; note = 2'-deoxy-2'-fluorouridine-3'-phosphate
  modified_base 10: mod_base = OTHER; note = 2'-deoxy-2'-fluoroadenosine-3'-phosphate
  modified_base 11: mod_base = OTHER; note = 2'-deoxy-2'-fluoroadenosine-3'-phosphate
  modified_base 12: mod_base = OTHER; note = 2'-O-methyluridine-3'-phosphate
  modified_base 13: mod_base = OTHER; note = 2'-O-methylguanosine-3'-phosphate
  modified_base 14: mod_base = OTHER; note = 2'-O-methylguanosine-3'-phosphate
  modified_base 15: mod_base = OTHER; note = 2'-O-methyladenosine-3'-phosphate
  modified_base 16: mod_base = OTHER; note = 2'-O-methylcytidine-3'-phosphate
  modified_base 17: mod_base = OTHER; note = 2'-O-methylcytidine-3'-phosphate
  modified_base 18: mod_base = OTHER; note = 2'-O-methyladenosine-3'-phosphate
  modified_base 19: mod_base = OTHER; note = 2'-O-methylguanosine-3'-phosphorothioate
  modified_base 20: mod_base = OTHER; note = 2'-O-methyluridine-3'-phosphorothioate
  modified_base 21: mod_base = OTHER; note = 2'-O-methyladenosine
aaggaaagtaatggaccagta

SEQ ID NO: 22 - DNA, 23 bp, synthetic construct
  source 1..23: mol_type = other DNA
  modified_base 1: mod_base = OTHER; note = 2'-O-methyluridine-3'-phosphorothioate 5'-(E)-Vinylphosphonate
  modified_base 2: mod_base = OTHER; note = 2'-deoxyadenosine-3'-phosphorothioate
  modified_base 3: mod_base = OTHER; note = 2'-O-methylcytidine-3'-phosphate
  modified_base 4: mod_base = OTHER; note = 2'-O-methyluridine-3'-phosphate
  modified_base 6: mod_base = OTHER; note = 2'-O-methylguanosine-3'-phosphate
  modified_base 7: mod_base = OTHER; note = Thymidine-glycol nucleic acid (GNA), S-Isomer
  modified_base 8: mod_base = OTHER; note = 2'-O-methylcytidine-3'-phosphate
  modified_base 9: mod_base = OTHER; note = 2'-O-methylcytidine-3'-phosphate
  modified_base 10: mod_base = OTHER; note = 2'-O-methyladenosine-3'-phosphate
  modified_base 11: mod_base = OTHER; note = 2'-O-methyluridine-3'-phosphate
  modified_base 13: mod_base = OTHER; note = 2'-O-methyladenosine-3'-phosphate
  modified_base 14: mod_base = OTHER; note = 2'-deoxy-2'-fluorocytidine-3'-phosphate
  modified_base 15: mod_base = OTHER; note = 2'-O-methyluridine-3'-phosphate
  modified_base 16: mod_base = OTHER; note = 2'-O-methyluridine-3'-phosphate
  modified_base 17: mod_base = OTHER; note = 2'-O-methyluridine-3'-phosphate
  modified_base 18: mod_base = OTHER; note = 2'-O-methylcytidine-3'-phosphate
  modified_base 19: mod_base = OTHER; note = 2'-O-methylcytidine-3'-phosphate
  modified_base 20: mod_base = OTHER; note = 2'-O-methyluridine-3'-phosphate
  modified_base 21: mod_base = OTHER; note = 2'-O-methyluridine-3'-phosphorothioate
  modified_base 22: mod_base = OTHER; note = 2'-O-methylcytidine-3'-phosphorothioate
  modified_base 23: mod_base = OTHER; note = 2'-O-methyluridine
  misc_feature 1: note = RNA
  misc_feature 3..4: note = RNA
  misc_feature 6..11: note = RNA
  misc_feature 13..23: note = RNA
  misc_feature 2: note = DNA
  misc_feature 5: note = DNA
  misc_feature 12: note = DNA
tactggtccattactttccttct

SEQ ID NO: 23 - RNA, 21 nt, synthetic construct
  source 1..21: mol_type = other RNA
  modified_base 1: mod_base = OTHER; note = 2'-O-methyladenosine-3'-phosphorothioate
  modified_base 2: mod_base = OTHER; note = 2'-O-methyluridine-3'-phosphorothioate
  modified_base 3: mod_base = OTHER; note = 2'-O-methylcytidine-3'-phosphate
  modified_base 4: mod_base = OTHER; note = 2'-O-methyladenosine-3'-phosphate
  modified_base 5: mod_base = OTHER; note = 2'-O-methyladenosine-3'-phosphate
  modified_base 6: mod_base = OTHER; note = 2'-O-hexadecyl-uridine-3'-phosphate
  modified_base 7: mod_base = OTHER; note = 2'-O-methyluridine-3'-phosphate
  modified_base 8: mod_base = OTHER; note = 2'-O-methyluridine-3'-phosphate
  modified_base 9: mod_base = OTHER; note = 2'-deoxy-2'-fluorocytidine-3'-phosphate
  modified_base 10: mod_base = OTHER; note = 2'-deoxy-2'-fluoroguanosine-3'-phosphate
  modified_base 11: mod_base = OTHER; note = 2'-deoxy-2'-fluoroadenosine-3'-phosphate
  modified_base 12: mod_base = OTHER; note = 2'-O-methylguanosine-3'-phosphate
  modified_base 13: mod_base = OTHER; note = 2'-O-methylcytidine-3'-phosphate
  modified_base 14: mod_base = OTHER; note = 2'-O-methyladenosine-3'-phosphate
  modified_base 15: mod_base = OTHER; note = 2'-O-methylguanosine-3'-phosphate
  modified_base 16: mod_base = OTHER; note = 2'-O-methyladenosine-3'-phosphate
  modified_base 17: mod_base = OTHER; note = 2'-O-methyladenosine-3'-phosphate
  modified_base 18: mod_base = OTHER; note = 2'-O-methylguanosine-3'-phosphate
  modified_base 19: mod_base = OTHER; note = 2'-O-methylguanosine-3'-phosphorothioate
  modified_base 20: mod_base = OTHER; note = 2'-O-methyladenosine-3'-phosphorothioate
  modified_base 21: mod_base = OTHER; note = 2'-O-methyladenosine
atcaatttcgagcagaaggaa

SEQ ID NO: 24 - DNA, 23 bp, synthetic construct
  source 1..23: mol_type = other DNA
  modified_base 1: mod_base = OTHER; note = 2'-O-methyluridine-3'-phosphorothioate 5'-(E)-Vinylphosphonate
  modified_base 2: mod_base = OTHER; note = 2'-deoxy-2'-fluorouridine-3'-phosphorothioate
  modified_base 3: mod_base = OTHER; note = 2'-O-methylcytidine-3'-phosphate
  modified_base 4: mod_base = OTHER; note = 2'-O-methylcytidine-3'-phosphate
  modified_base 6: mod_base = OTHER; note = 2'-O-methyluridine-3'-phosphate
  modified_base 7: mod_base = OTHER; note = cytidine-2'-phosphate
  modified_base 8: mod_base = OTHER; note = 2'-O-methyluridine-3'-phosphate
  modified_base 9: mod_base = OTHER; note = 2'-O-methylguanosine-3'-phosphate
  modified_base 10: mod_base = OTHER; note = 2'-O-methylcytidine-3'-phosphate
  modified_base 11: mod_base = OTHER; note = 2'-O-methyluridine-3'-phosphate
  modified_base 12: mod_base = OTHER; note = 2'-O-methylcytidine-3'-phosphate
  modified_base 13: mod_base = OTHER; note = 2'-O-methylguanosine-3'-phosphate
  modified_base 14: mod_base = OTHER; note = 2'-deoxy-2'-fluoroadenosine-3'-phosphate
  modified_base 15: mod_base = OTHER; note = 2'-O-methyladenosine-3'-phosphate
  modified_base 16: mod_base = OTHER; note = 2'-deoxy-2'-fluoroadenosine-3'-phosphate
  modified_base 17: mod_base = OTHER; note = 2'-O-methyluridine-3'-phosphate
  modified_base 18: mod_base = OTHER; note = 2'-O-methyluridine-3'-phosphate
  modified_base 19: mod_base = OTHER; note = 2'-O-methylguanosine-3'-phosphate
  modified_base 20: mod_base = OTHER; note = 2'-O-methyladenosine-3'-phosphate
  modified_base 21: mod_base = OTHER; note = 2'-O-methyluridine-3'-phosphorothioate
  modified_base 22: mod_base = OTHER; note = 2'-O-methylguanosine-3'-phosphorothioate
  modified_base 23: mod_base = OTHER; note = 2'-O-methylguanosine
  misc_feature 1..4: note = RNA
  misc_feature 6..23: note = RNA
  misc_feature 5: note = DNA
ttccttctgctcgaaattgatgg

SEQ ID NO: 25 - RNA, 21 nt, synthetic construct
  source 1..21: mol_type = other RNA
  modified_base 1: mod_base = OTHER; note = 2'-O-methylcytidine-3'-phosphorothioate
  modified_base 2: mod_base = OTHER; note = 2'-O-methylcytidine-3'-phosphorothioate
  modified_base 3: mod_base = OTHER; note = 2'-O-methyluridine-3'-phosphate
  modified_base 4: mod_base = OTHER; note = 2'-O-methylcytidine-3'-phosphate
  modified_base 5: mod_base = OTHER; note = 2'-O-methyladenosine-3'-phosphate
  modified_base 6: mod_base = OTHER; note = 2'-O-hexadecyl-cytidine-3'-phosphate
  modified_base 7: mod_base = OTHER; note = 2'-O-methyluridine-3'-phosphate
  modified_base 8: mod_base = OTHER; note = 2'-O-methyluridine-3'-phosphate
  modified_base 9: mod_base = OTHER; note = 2'-deoxy-2'-fluorouridine-3'-phosphate
  modified_base 10: mod_base = OTHER; note = 2'-deoxy-2'-fluoroadenosine-3'-phosphate
  modified_base 11: mod_base = OTHER; note = 2'-deoxy-2'-fluoroadenosine-3'-phosphate
  modified_base 12: mod_base = OTHER; note = 2'-O-methyluridine-3'-phosphate
  modified_base 13: mod_base = OTHER; note = 2'-O-methylcytidine-3'-phosphate
  modified_base 14: mod_base = OTHER; note = 2'-O-methylcytidine-3'-phosphate
  modified_base 15: mod_base = OTHER; note = 2'-O-methyluridine-3'-phosphate
  modified_base 16: mod_base = OTHER; note = 2'-O-methylcytidine-3'-phosphate
  modified_base 17: mod_base = OTHER; note = 2'-O-methyluridine-3'-phosphate
  modified_base 18: mod_base = OTHER; note = 2'-O-methyladenosine-3'-phosphate
  modified_base 19: mod_base = OTHER; note = 2'-O-methyluridine-3'-phosphorothioate
  modified_base 20: mod_base = OTHER; note = 2'-O-methylcytidine-3'-phosphorothioate
  modified_base 21: mod_base = OTHER; note = 2'-O-methyladenosine
cctcactttaatcctctatca

SEQ ID NO: 26 - DNA, 23 bp, synthetic construct
  source 1..23: mol_type = other DNA
  modified_base 1: mod_base = OTHER; note = 2'-O-methyluridine-3'-phosphorothioate 5'-(E)-Vinylphosphonate
  modified_base 2: mod_base = OTHER; note = 2'-deoxyguanosine-3'-phosphorothioate
  modified_base 3: mod_base = OTHER; note = 2'-O-methyladenosine-3'-phosphate
  modified_base 4: mod_base = OTHER; note = 2'-O-methyluridine-3'-phosphate
  modified_base 6: mod_base = OTHER; note = 2'-O-methylguanosine-3'-phosphate
  modified_base 7: mod_base = OTHER; note = Adenosine-glycol nucleic acid (GNA), S-isomer
  modified_base 8: mod_base = OTHER; note = 2'-O-methylguanosine-3'-phosphate
  modified_base 9: mod_base = OTHER; note = 2'-O-methylguanosine-3'-phosphate
  modified_base 10: mod_base = OTHER; note = 2'-O-methyladenosine-3'-phosphate
  modified_base 11: mod_base = OTHER; note = 2'-O-methyluridine-3'-phosphate
  modified_base 13: mod_base = OTHER; note = 2'-O-methyladenosine-3'-phosphate
  modified_base 14: mod_base = OTHER; note = 2'-deoxy-2'-fluoroadenosine-3'-phosphate
  modified_base 15: mod_base = OTHER; note = 2'-O-methyladenosine-3'-phosphate
  modified_base 16: mod_base = OTHER; note = 2'-O-methylguanosine-3'-phosphate
  modified_base 17: mod_base = OTHER; note = 2'-O-methyluridine-3'-phosphate
  modified_base 18: mod_base = OTHER; note = 2'-O-methylguanosine-3'-phosphate
  modified_base 19: mod_base = OTHER; note = 2'-O-methyladenosine-3'-phosphate
  modified_base 20: mod_base = OTHER; note = 2'-O-methylguanosine-3'-phosphate
  modified_base 21: mod_base = OTHER; note = 2'-O-methylguanosine-3'-phosphorothioate
  modified_base 22: mod_base = OTHER; note = 2'-O-methyladenosine-3'-phosphorothioate
  modified_base 23: mod_base = OTHER; note = 2'-O-methylcytidine
  misc_feature 1: note = RNA
  misc_feature 3..4: note = RNA
  misc_feature 6..11: note = RNA
  misc_feature 13..23: note = RNA
  misc_feature 2: note = DNA
  misc_feature 5: note = DNA
  misc_feature 12: note = DNA
tgatagaggattaaagtgaggac

SEQ ID NO: 27 - RNA, 21 nt, synthetic construct
  source 1..21: mol_type = other RNA
  modified_base 1: mod_base = OTHER; note = 2'-O-methyladenosine-3'-phosphorothioate
  modified_base 2: mod_base = OTHER; note = 2'-O-methyladenosine-3'-phosphorothioate
  modified_base 3: mod_base = OTHER; note = 2'-O-methylguanosine-3'-phosphate
  modified_base 4: mod_base = OTHER; note = 2'-O-methylguanosine-3'-phosphate
  modified_base 5: mod_base = OTHER; note = 2'-O-methyladenosine-3'-phosphate
  modified_base 6: mod_base = OTHER; note = 2'-O-hexadecyl-uridine-3'-phosphate
  modified_base 7: mod_base = OTHER; note = 2'-O-methylguanosine-3'-phosphate
  modified_base 8: mod_base = OTHER; note = 2'-O-methyladenosine-3'-phosphate
  modified_base 9: mod_base = OTHER; note = 2'-deoxy-2'-fluoroadenosine-3'-phosphate
  modified_base 10: mod_base = OTHER; note = 2'-deoxy-2'-fluoroguanosine-3'-phosphate
  modified_base 11: mod_base = OTHER; note = 2'-deoxy-2'-fluoroadenosine-3'-phosphate
  modified_base 12: mod_base = OTHER; note = 2'-O-methylguanosine-3'-phosphate
  modified_base 13: mod_base = OTHER; note = 2'-O-methyladenosine-3'-phosphate
  modified_base 14: mod_base = OTHER; note = 2'-O-methylguanosine-3'-phosphate
  modified_base 15: mod_base = OTHER; note = 2'-O-methylguanosine-3'-phosphate
  modified_base 16: mod_base = OTHER; note = 2'-O-methylcytidine-3'-phosphate
  modified_base 17: mod_base = OTHER; note = 2'-O-methyladenosine-3'-phosphate
  modified_base 18: mod_base = OTHER; note = 2'-O-methyluridine-3'-phosphate
  modified_base 19: mod_base = OTHER; note = 2'-O-methylguanosine-3'-phosphorothioate
  modified_base 20: mod_base = OTHER; note = 2'-O-methyluridine-3'-phosphorothioate
  modified_base 21: mod_base = OTHER; note = 2'-O-methyladenosine
aaggatgaagagaggcatgta

SEQ ID NO: 28 - DNA, 23 bp, synthetic construct
  source 1..23: mol_type = other DNA
  modified_base 1: mod_base = OTHER; note = 2'-O-methyluridine-3'-phosphorothioate 5'-(E)-Vinylphosphonate
  modified_base 2: mod_base = OTHER; note = 2'-deoxy-2'-fluoroadenosine-3'-phosphorothioate
  modified_base 3: mod_base = OTHER; note = 2'-O-methylcytidine-3'-phosphate
  modified_base 4: mod_base = OTHER; note = 2'-O-methyladenosine-3'-phosphate
  modified_base 6: mod_base = OTHER; note = 2'-O-methylguanosine-3'-phosphate
  modified_base 7: mod_base = OTHER; note = cytidine-2'-phosphate
  modified_base 8: mod_base = OTHER; note = 2'-O-methylcytidine-3'-phosphate
  modified_base 9: mod_base = OTHER; note = 2'-O-methyluridine-3'-phosphate
  modified_base 10: mod_base = OTHER; note = 2'-O-methylcytidine-3'-phosphate
  modified_base 11: mod_base = OTHER; note = 2'-O-methyluridine-3'-phosphate
  modified_base 12: mod_base = OTHER; note = 2'-O-methylcytidine-3'-phosphate
  modified_base 13: mod_base = OTHER; note = 2'-O-methyluridine-3'-phosphate
  modified_base 14: mod_base = OTHER; note = 2'-deoxy-2'-fluorouridine-3'-phosphate
  modified_base 15: mod_base = OTHER; note = 2'-O-methylcytidine-3'-phosphate
  modified_base 16: mod_base = OTHER; note = 2'-deoxy-2'-fluoroadenosine-3'-phosphate
  modified_base 17: mod_base = OTHER; note = 2'-O-methyluridine-3'-phosphate
  modified_base 18: mod_base = OTHER; note = 2'-O-methylcytidine-3'-phosphate
  modified_base 19: mod_base = OTHER; note = 2'-O-methylcytidine-3'-phosphate
  modified_base 20: mod_base = OTHER; note = 2'-O-methyluridine-3'-phosphate
  modified_base 21: mod_base = OTHER; note = 2'-O-methyluridine-3'-phosphorothioate
  modified_base 22: mod_base = OTHER; note = 2'-O-methyluridine-3'-phosphorothioate
  modified_base 23: mod_base = OTHER; note = 2'-O-methylguanosine
  misc_feature 1..4: note = RNA
  misc_feature 6..23: note = RNA
  misc_feature 5: note = DNA
tacatgcctctcttcatcctttg

SEQ ID NO: 29 - RNA, 21 nt, synthetic construct
  source 1..21: mol_type = other RNA
  modified_base 1: mod_base = OTHER; note = 2'-O-methyladenosine-3'-phosphorothioate
  modified_base 2: mod_base = OTHER; note = 2'-O-methyladenosine-3'-phosphorothioate
  modified_base 3: mod_base = OTHER; note = 2'-O-methyluridine-3'-phosphate
  modified_base 4: mod_base = OTHER; note = 2'-O-methyluridine-3'-phosphate
  modified_base 5: mod_base = OTHER; note = 2'-O-methyluridine-3'-phosphate
  modified_base 6: mod_base = OTHER; note = 2'-O-hexadecyl-cytidine-3'-phosphate
  modified_base 7: mod_base = OTHER; note = 2'-O-methylguanosine-3'-phosphate
  modified_base 8: mod_base = OTHER; note = 2'-O-methyladenosine-3'-phosphate
  modified_base 9: mod_base = OTHER; note = 2'-deoxy-2'-fluoroguanosine-3'-phosphate
  modified_base 10: mod_base = OTHER; note = 2'-deoxy-2'-fluorocytidine-3'-phosphate
  modified_base 11: mod_base = OTHER; note = 2'-deoxy-2'-fluoroadenosine-3'-phosphate
  modified_base 12: mod_base = OTHER; note = 2'-O-methylguanosine-3'-phosphate
  modified_base 13: mod_base = OTHER; note = 2'-O-methyladenosine-3'-phosphate
  modified_base 14: mod_base = OTHER; note = 2'-O-methyladenosine-3'-phosphate
  modified_base 15: mod_base = OTHER; note = 2'-O-methylguanosine-3'-phosphate
  modified_base 16: mod_base = OTHER; note = 2'-O-methylguanosine-3'-phosphate
  modified_base 17: mod_base = OTHER; note = 2'-O-methyladenosine-3'-phosphate
  modified_base 18: mod_base = OTHER; note = 2'-O-methyladenosine-3'-phosphate
  modified_base 19: mod_base = OTHER; note = 2'-O-methyladenosine-3'-phosphorothioate
  modified_base 20: mod_base = OTHER; note = 2'-O-methylguanosine-3'-phosphorothioate
  modified_base 21: mod_base = OTHER; note = 2'-O-methyladenosine
aatttcgagcagaaggaaaga

SEQ ID NO: 30 - DNA, 23 bp, synthetic construct
  source 1..23: mol_type = other DNA
  modified_base 1: mod_base = OTHER; note = 2'-O-methyluridine-3'-phosphorothioate 5'-(E)-Vinylphosphonate
  modified_base 2: mod_base = OTHER; note = 2'-deoxy-2'-fluorocytidine-3'-phosphorothioate
  modified_base 3: mod_base = OTHER; note = 2'-O-methyluridine-3'-phosphate
  modified_base 4: mod_base = OTHER; note = 2'-O-methyluridine-3'-phosphate
  modified_base 6: mod_base = OTHER; note = 2'-O-methylcytidine-3'-phosphate
  modified_base 7: mod_base = OTHER; note = cytidine-2'-phosphate
  modified_base 8: mod_base = OTHER; note = 2'-O-methyluridine-3'-phosphate
  modified_base 9: mod_base = OTHER; note = 2'-O-methyluridine-3'-phosphate
  modified_base 10: mod_base = OTHER; note = 2'-O-methylcytidine-3'-phosphate
  modified_base 11: mod_base = OTHER; note = 2'-O-methyluridine-3'-phosphate
  modified_base 12: mod_base = OTHER; note = 2'-O-methylguanosine-3'-phosphate
  modified_base 13: mod_base = OTHER; note = 2'-O-methylcytidine-3'-phosphate
  modified_base 14: mod_base = OTHER; note = 2'-deoxy-2'-fluorouridine-3'-phosphate
  modified_base 15: mod_base = OTHER; note = 2'-O-methylcytidine-3'-phosphate
  modified_base 16: mod_base = OTHER; note = 2'-deoxy-2'-fluoroguanosine-3'-phosphate
  modified_base 17: mod_base = OTHER; note = 2'-O-methyladenosine-3'-phosphate
  modified_base 18: mod_base = OTHER; note = 2'-O-methyladenosine-3'-phosphate
  modified_base 19: mod_base = OTHER; note = 2'-O-methyladenosine-3'-phosphate
  modified_base 20: mod_base = OTHER; note = 2'-O-methyluridine-3'-phosphate
  modified_base 21: mod_base = OTHER; note = 2'-O-methyluridine-3'-phosphorothioate
  modified_base 22: mod_base = OTHER; note = 2'-O-methylguanosine-3'-phosphorothioate
  modified_base 23: mod_base = OTHER; note = 2'-O-methylguanosine
  misc_feature 1..4: note = RNA
  misc_feature 6..23: note = RNA
  misc_feature 5: note = DNA
tctttccttctgctcgaaattgg

SEQ ID NO: 31 - protein, 16 aa, unidentified
  REGION 1..16: note = source = /note="Description of Unknown: RFGF peptide sequence"
AAVALLPAVLLALLAP

SEQ ID NO: 32 - protein, 11 aa, unidentified
  REGION 1..11: note = source = /note="Description of Unknown: RFGF analogue peptide sequence"
AALLPVLLAAP

SEQ ID NO: 33 - protein, 13 aa, Human immunodeficiency virus 1
GRKKRRQRRRPPQ

SEQ ID NO: 34 - protein, 16 aa, Drosophila sp.
RQIKIWFQNRRMKWKK

SEQ ID NO: 35 - RNA, 21 nt, synthetic construct
  source 1..21: mol_type = other RNA
atcagtttggagataatacat

SEQ ID NO: 36 - RNA, 21 nt, synthetic construct
  source 1..21: mol_type = other RNA
tctttcgaagattctgtgatt

SEQ ID NO: 37 - RNA, 21 nt, synthetic construct
  source 1..21: mol_type = other RNA
aggtgtctttcgaagattctt

SEQ ID NO: 38 - RNA, 21 nt, synthetic construct
  source 1..21: mol_type = other RNA
ctttaatcctctatccagaca

SEQ ID NO: 39 - RNA, 21 nt, synthetic construct
  source 1..21: mol_type = other RNA
tgcaggtcctcactttaatct

SEQ ID NO: 40 - RNA, 21 nt, synthetic construct
  source 1..21: mol_type = other RNA
gtctttcgaagattctgtgat

SEQ ID NO: 41 - RNA, 21 nt, synthetic construct
  source 1..21: mol_type = other RNA
caggtcctcactttaatcctt

SEQ ID NO: 42 - RNA, 21 nt, synthetic construct
  source 1..21: mol_type = other RNA
cctcactttaatcctctatct

SEQ ID NO: 43 - RNA, 21 nt, synthetic construct
  source 1..21: mol_type = other RNA
accagtgcaggtcctcacttt

SEQ ID NO: 44 - RNA, 21 nt, synthetic construct
  source 1..21: mol_type = other RNA
agcagatgacttgggcaaagt

SEQ ID NO: 45 - RNA, 21 nt, synthetic construct
  source 1..21: mol_type = other RNA
gaaaaagcagatgacttgggt

SEQ ID NO: 46 - RNA, 21 nt, synthetic construct
  source 1..21: mol_type = other RNA
ttcgagcagaaggaaagtaat

SEQ ID NO: 47 - RNA, 21 nt, synthetic construct
  source 1..21: mol_type = other RNA
atttcgagcagaaggaaagta

SEQ ID NO: 48 - RNA, 21 nt, synthetic construct
  source 1..21: mol_type = other RNA
cagtttggagataatacacaa

SEQ ID NO: 49 - RNA, 21 nt, synthetic construct
  source 1..21: mol_type = other RNA
ttcatcagtttggagataata

SEQ ID NO: 50 - RNA, 21 nt, synthetic construct
  source 1..21: mol_type = other RNA
ctcactttaatcctctatcca

SEQ ID NO: 51 - RNA, 21 nt, synthetic construct
  source 1..21: mol_type = other RNA
ttcgaagattctgtgatctct

SEQ ID NO: 52 - RNA, 21 nt, synthetic construct
  source 1..21: mol_type = other RNA
aagcagatgacttgggcaaat

SEQ ID NO: 53 - RNA, 21 nt, synthetic construct
  source 1..21: mol_type = other RNA
ggtcctcactttaatcctcta

SEQ ID NO: 54 - RNA, 21 nt, synthetic construct
  source 1..21: mol_type = other RNA
cagtgcaggtcctcactttaa

SEQ ID NO: 55 - RNA, 21 nt, synthetic construct
  source 1..21: mol_type = other RNA
cattacaggattgactgaagt

SEQ ID NO: 56 - RNA, 21 nt, synthetic construct
  source 1..21: mol_type = other RNA
aaagtaaaaagacaggaaact

SEQ ID NO: 57 - RNA, 21 nt, synthetic construct
  source 1..21: mol_type = other RNA
agtttggagataatacacaat

SEQ ID NO: 58 - RNA, 21 nt, synthetic construct
  source 1..21: mol_type = other RNA
cgaagattctgtgatctcgct

SEQ ID NO: 59 - RNA, 21 nt, synthetic construct
  source 1..21: mol_type = other RNA
gcattacaggattgactgaat

SEQ ID NO: 60 - RNA, 21 nt, synthetic construct
  source 1..21: mol_type = other RNA
tcatcagtttggagataatat

SEQ ID NO: 61 - RNA, 21 nt, synthetic construct
  source 1..21: mol_type = other RNA
actttaatcctctatccagat

SEQ ID NO: 62 - RNA, 21 nt, synthetic construct
  source 1..21: mol_type = other RNA
gtaaaaagacaggaaacgctt

SEQ ID NO: 63 - RNA, 21 nt, synthetic construct
  source 1..21: mol_type = other RNA
atcaatttcgagcagaaggaa

SEQ ID NO: 64 - RNA, 21 nt, synthetic construct
  source 1..21: mol_type = other RNA
tcctcactttaatcctctatt

SEQ ID NO: 65 - RNA, 21 nt, synthetic construct
  source 1..21: mol_type = other RNA
gtcctcactttaatcctctat

SEQ ID NO: 66 - RNA, 21 nt, synthetic construct
  source 1..21: mol_type = other RNA
catcagtttggagataataca

SEQ ID NO: 67 - RNA, 21 nt, synthetic construct
  source 1..21: mol_type = other RNA
aagtaaaaagacaggaaacgt

SEQ ID NO: 68 - RNA, 21 nt, synthetic construct
  source 1..21: mol_type = other RNA
agcattacaggattgactgaa

SEQ ID NO: 69 - RNA, 21 nt, synthetic construct
  source 1..21: mol_type = other RNA
attctgtgatctcgctctcat

SEQ ID NO: 70 - RNA, 21 nt, synthetic construct
  source 1..21: mol_type = other RNA
gttcatcagtttggagataat

SEQ ID NO: 71 - RNA, 21 nt, synthetic construct
  source 1..21: mol_type = other RNA
cactttaatcctctatccaga

SEQ ID NO: 72 - RNA, 21 nt, synthetic construct
  source 1..21: mol_type = other RNA
gtgtctttcgaagattctgtt

SEQ ID NO: 73 - RNA, 21 nt, synthetic construct
  source 1..21: mol_type = other RNA
cgagcagaaggaaagtaatgt

SEQ ID NO: 74 - RNA, 21 nt, synthetic construct
  source 1..21: mol_type = other RNA
tccatgttcatcagtttggat

SEQ ID NO: 75 - RNA, 21 nt, synthetic construct
  source 1..21: mol_type = other RNA
ccagtgcaggtcctcacttta

SEQ ID NO: 76 - RNA, 21 nt, synthetic construct
  source 1..21: mol_type = other RNA
aggtcctcactttaatcctct

SEQ ID NO: 77 - RNA, 21 nt, synthetic construct
  source 1..21: mol_type = other RNA
gccaaggtgtctttcgaagat

SEQ ID NO: 78 - RNA, 21 nt, synthetic construct
  source 1..21: mol_type = other RNA
agtaaaaagacaggaaacgct

SEQ ID NO: 79 - RNA, 21 nt, synthetic construct
  source 1..21: mol_type = other RNA
atacacaaggctgtaccagtt

SEQ ID NO: 80 - RNA, 21 nt, synthetic construct
  source 1..21: mol_type = other RNA
aatcctctatccagacaacat

SEQ ID NO: 81 - RNA, 21 nt, synthetic construct
  source 1..21: mol_type = other RNA
tcgagcagaaggaaagtaatt

SEQ ID NO: 82 - RNA, 21 nt, synthetic construct
  source 1..21: mol_type = other RNA
tcactttaatcctctatccat

SEQ ID NO: 83 - RNA, 21 nt, synthetic construct
  source 1..21: mol_type = other RNA
cagaaggaaagtaatggacca

SEQ ID NO: 84 - RNA, 21 nt, synthetic construct
  source 1..21: mol_type = other RNA
caatttcgagcagaaggaaat

SEQ ID NO: 85 - RNA, 21 nt, synthetic construct
  source 1..21: mol_type = other RNA
aaggaaagtaatggaccagtt

SEQ ID NO: 86 - RNA, 21 nt, synthetic construct
  source 1..21: mol_type = other RNA
agtgcaggtcctcactttaat

SEQ ID NO: 87 - RNA, 21 nt, synthetic construct
  source 1..21: mol_type = other RNA
gattccatgttcatcagtttg

SEQ ID NO: 88 - RNA, 21 nt, synthetic construct
  source 1..21: mol_type = other RNA
ctttcgaagattctgtgatct

SEQ ID NO: 89 - RNA, 21 nt, synthetic construct
  source 1..21: mol_type = other RNA
tttcgagcagaaggaaagtaa

SEQ ID NO: 90 - RNA, 21 nt, synthetic construct
  source 1..21: mol_type = other RNA
taatcctctatccagacaaca

SEQ ID NO: 91 - RNA, 21 nt, synthetic construct
  source 1..21: mol_type = other RNA
tgttcatcagtttggagataa

SEQ ID NO: 92 - RNA, 21 nt, synthetic construct
  source 1..21: mol_type = other RNA
gtgcaggtcctcactttaatt

SEQ ID NO: 93 - RNA, 21 nt, synthetic construct
  source 1..21: mol_type = other RNA
taatggaccagtgaaggtgtt

SEQ ID NO: 94 - RNA, 21 nt, synthetic construct
  source 1..21: mol_type = other RNA
ttaatcctctatccagacaat

SEQ ID NO: 95 - RNA, 21 nt, synthetic construct
  source 1..21: mol_type = other RNA
tcaggagaccattccatcatt

SEQ ID NO: 96 - RNA, 21 nt, synthetic construct
  source 1..21: mol_type = other RNA
caccatcaatttcgagcagaa

SEQ ID NO: 97 - RNA, 21 nt, synthetic construct
  source 1..21: mol_type = other RNA
gcaggtcctcactttaatcct

SEQ ID NO: 98 - RNA, 21 nt, synthetic construct
  source 1..21: mol_type = other RNA
tttcgaagattctgtgatctt

SEQ ID NO: 99 - RNA, 21 nt, synthetic construct
  source 1..21: mol_type = other RNA
tgcatggattccatgttcatt

SEQ ID NO: 100 - RNA, 21 nt, synthetic construct
  source 1..21: mol_type = other RNA
atcctctatccagacaacact

SEQ ID NO: 101 - RNA, 21 nt, synthetic construct
  source 1..21: mol_type = other RNA
agattctgtgatctcgctctt

SEQ ID NO: 102 - RNA, 21 nt, synthetic construct
  source 1..21: mol_type = other RNA
gaagagaggcatgttggagat

SEQ ID NO: 103 - RNA, 21 nt, synthetic construct
  source 1..21: mol_type = other RNA
ttgggcaaaggtggaaatgaa

SEQ ID NO: 104 - RNA, 21 nt, synthetic construct
  source 1..21: mol_type = other RNA
tcaatttcgagcagaaggaaa

SEQ ID NO: 105 - RNA, 21 nt, synthetic construct
  source 1..21: mol_type = other RNA
catgaaaaagcagatgacttt

SEQ ID NO: 106 - RNA, 21 nt, synthetic construct
  source 1..21: mol_type = other RNA
tggattccatgttcatcagtt

SEQ ID NO: 107 - RNA, 21 nt, synthetic construct
  source 1..21: mol_type = other RNA
gagaggcatgttggagacctt

SEQ ID NO: 108 - RNA, 21 nt, synthetic construct
  source 1..21: mol_type = other RNA
gaagattctgtgatctcgctt

SEQ ID NO: 109 - RNA, 21 nt, synthetic construct
  source 1..21: mol_type = other RNA
tcagtttggagataatacaca

SEQ ID NO: 110 - RNA, 21 nt, synthetic construct
  source 1..21: mol_type = other RNA
caaggtgtctttcgaagattt

SEQ ID NO: 111 - RNA, 21 nt, synthetic construct
  source 1..21: mol_type = other RNA
atgttcatcagtttggagata

SEQ ID NO: 112 - RNA, 21 nt, synthetic construct
  source 1..21: mol_type = other RNA
accatcaatttcgagcagaat

SEQ ID NO: 113 - RNA, 21 nt, synthetic construct
  source 1..21: mol_type = other RNA
atgtgactgctggcaaagatt

SEQ ID NO: 114 - RNA, 21 nt, synthetic construct
  source 1..21: mol_type = other RNA
ggtggaaatgaagaaagtaaa

SEQ ID NO: 115 - RNA, 21 nt, synthetic construct
  source 1..21: mol_type = other RNA
ggattccatgttcatcagttt

SEQ ID NO: 116 - RNA, 21 nt, synthetic construct
  source 1..21: mol_type = other RNA
aatgtgactgctggcaaagat

SEQ ID NO: 117 - RNA, 21 nt, synthetic construct
  source 1..21: mol_type = other RNA
gtccatgaaaaagcagatgat

SEQ ID NO: 118 - RNA, 23 nt, synthetic construct
  source 1..23: mol_type = other RNA
atgtattatctccaaactgatga

SEQ ID NO: 119 - RNA, 23 nt, synthetic construct
  source 1..23: mol_type = other RNA
aatcacagaatcttcgaaagaca

SEQ ID NO: 120 - RNA, 23 nt, synthetic construct
  source 1..23: mol_type = other RNA
aagaatcttcgaaagacaccttg

SEQ ID NO: 121 - RNA, 23 nt, synthetic construct
  source 1..23: mol_type = other RNA
tgtctggatagaggattaaagtg

SEQ ID NO: 122 - RNA, 23 nt, synthetic construct
  source 1..23: mol_type = other RNA
agattaaagtgaggacctgcact

SEQ ID NO: 123 - RNA, 23 nt, synthetic construct
  source 1..23: mol_type = other RNA
atcacagaatcttcgaaagacac

SEQ ID NO: 124 - RNA, 23 nt, synthetic construct
  source 1..23: mol_type = other RNA
aaggattaaagtgaggacctgca

SEQ ID NO: 125 - RNA, 23 nt, synthetic construct
  source 1..23: mol_type = other RNA
agatagaggattaaagtgaggac

SEQ ID NO: 126 - RNA, 23 nt, synthetic construct
  source 1..23: mol_type = other RNA
aaagtgaggacctgcactggtac

SEQ ID NO: 127 - RNA, 23 nt, synthetic construct
  source 1..23: mol_type = other RNA
actttgcccaagtcatctgcttt

SEQ ID NO: 128 - RNA, 23 nt, synthetic construct
  source 1..23: mol_type = other RNA
acccaagtcatctgctttttcat

SEQ ID NO: 129 - RNA, 23 nt, synthetic construct
  source 1..23: mol_type = other RNA
attactttccttctgctcgaaat

SEQ ID NO: 130 - RNA, 23 nt, synthetic construct
  source 1..23: mol_type = other RNA
tactttccttctgctcgaaattg

SEQ ID NO: 131 - RNA, 23 nt, synthetic construct
  source 1..23: mol_type = other RNA
ttgtgtattatctccaaactgat

SEQ ID NO: 132 - RNA, 23 nt, synthetic construct
  source 1..23: mol_type = other RNA
tattatctccaaactgatgaaca

SEQ ID NO: 133 - RNA, 23 nt, synthetic construct
  source 1..23: mol_type = other RNA
tggatagaggattaaagtgagga

SEQ ID NO: 134 - RNA, 23 nt, synthetic construct
  source 1..23: mol_type = other RNA
agagatcacagaatcttcgaaag

SEQ ID NO: 135 - RNA, 23 nt, synthetic construct
  source 1..23: mol_type = other RNA
atttgcccaagtcatctgctttt

SEQ ID NO: 136 - RNA, 23 nt, synthetic construct
  source 1..23: mol_type = other RNA
tagaggattaaagtgaggacctg

SEQ ID NO: 137 - RNA, 23 nt, synthetic construct
  source 1..23: mol_type = other RNA
ttaaagtgaggacctgcactggt

SEQ ID NO: 138 - RNA, 23 nt, synthetic construct
  source 1..23: mol_type = other RNA
acttcagtcaatcctgtaatgct

SEQ ID NO: 139 - RNA, 23 nt, synthetic construct
  source 1..23: mol_type = other RNA
agtttcctgtctttttactttct

SEQ ID NO: 140 - RNA, 23 nt, synthetic construct
  source 1..23: mol_type = other RNA
attgtgtattatctccaaactga

SEQ ID NO: 141 - RNA, 23 nt, synthetic construct
  source 1..23: mol_type = other RNA
agcgagatcacagaatcttcgaa

SEQ ID NO: 142 - RNA, 23 nt, synthetic construct
  source 1..23: mol_type = other RNA
attcagtcaatcctgtaatgctt

SEQ ID NO: 143 - RNA, 23 nt, synthetic construct
  source 1..23: mol_type = other RNA
atattatctccaaactgatgaac

SEQ ID NO: 144 - RNA, 23 nt, synthetic construct
  source 1..23: mol_type = other RNA
atctggatagaggattaaagtga

SEQ ID NO: 145 - RNA, 23 nt, synthetic construct
  source 1..23: mol_type = other RNA
aagcgtttcctgtctttttactt

SEQ ID NO: 146 - RNA, 23 nt, synthetic construct
  source 1..23: mol_type = other RNA
ttccttctgctcgaaattgatgg

SEQ ID NO: 147 - RNA, 23 nt, synthetic construct
  source 1..23: mol_type = other RNA
aatagaggattaaagtgaggacc

SEQ ID NO: 148 - RNA, 23 nt, synthetic construct
  source 1..23: mol_type = other RNA
atagaggattaaagtgaggacct

SEQ ID NO: 149 - RNA, 23 nt, synthetic construct
  source 1..23: mol_type = other RNA
tgtattatctccaaactgatgaa

SEQ ID NO: 150 - RNA, 23 nt, synthetic construct
  source 1..23: mol_type = other RNA
acgtttcctgtctttttactttc

SEQ ID NO: 151 - RNA, 23 nt, synthetic construct
  source 1..23: mol_type = other RNA
ttcagtcaatcctgtaatgcttc

SEQ ID NO: 152 - RNA, 23 nt, synthetic construct
  source 1..23: mol_type = other RNA
atgagagcgagatcacagaatct

SEQ ID NO: 153 - RNA, 23 nt, synthetic construct
  source 1..23: mol_type = other RNA
attatctccaaactgatgaacat

SEQ ID NO: 154 - RNA, 23 nt, synthetic construct
  source 1..23: mol_type = other RNA
tctggatagaggattaaagtgag

SEQ ID NO: 155 - RNA, 23 nt, synthetic construct
  source 1..23: mol_type = other RNA
aacagaatcttcgaaagacacct

SEQ ID NO: 156 - RNA, 23 nt, synthetic construct
  source 1..23: mol_type = other RNA
acattactttccttctgctcgaa

SEQ ID NO: 157 - RNA, 23 nt, synthetic construct
  source 1..23: mol_type = other RNA
atccaaactgatgaacatggaat

SEQ ID NO: 158 - RNA, 23 nt, synthetic construct
  source 1..23: mol_type = other RNA
taaagtgaggacctgcactggta

SEQ ID NO: 159 - RNA, 23 nt, synthetic construct
  source 1..23: mol_type = other RNA
agaggattaaagtgaggacctgc

SEQ ID NO: 160 - RNA, 23 nt, synthetic construct
  source 1..23: mol_type = other RNA
atcttcgaaagacaccttggcca

SEQ ID NO: 161 - RNA, 23 nt, synthetic construct
  source 1..23: mol_type = other RNA
agcgtttcctgtctttttacttt

SEQ ID NO: 162 - RNA, 23 nt, synthetic construct
  source 1..23: mol_type = other RNA
aactggtacagccttgtgtatta

SEQ ID NO: 163 - RNA, 23 nt, synthetic construct
  source 1..23: mol_type = other RNA
atgttgtctggatagaggattaa

SEQ ID NO: 164 - RNA, 23 nt, synthetic construct
  source 1..23: mol_type = other RNA
aattactttccttctgctcgaaa

SEQ ID NO: 165 - RNA, 23 nt, synthetic construct
  source 1..23: mol_type = other RNA
atggatagaggattaaagtgagg

SEQ ID NO: 166 - RNA, 23 nt, synthetic construct
  source 1..23: mol_type = other RNA
tggtccattactttccttctgct

SEQ ID NO: 167 - RNA, 23 nt, synthetic construct
  source 1..23: mol_type = other RNA
atttccttctgctcgaaattgat

SEQ ID NO: 168 - RNA, 23 nt, synthetic construct
  source 1..23: mol_type = other RNA
aactggtccattactttccttct

SEQ ID NO: 169 - RNA, 23 nt, synthetic construct
  source 1..23: mol_type = other RNA
attaaagtgaggacctgcactgg

SEQ ID NO: 170 - RNA, 23 nt, synthetic construct
  source 1..23: mol_type = other RNA
caaactgatgaacatggaatcca

SEQ ID NO: 171 - RNA, 23 nt, synthetic construct
  source 1..23: mol_type = other RNA
agatcacagaatcttcgaaagac

SEQ ID NO: 172 - RNA, 23 nt, synthetic construct
  source 1..23: mol_type = other RNA
ttactttccttctgctcgaaatt

SEQ ID NO: 173 - RNA, 23 nt, synthetic construct
  source 1..23: mol_type = other RNA
tgttgtctggatagaggattaaa

SEQ ID NO: 174 - RNA, 23 nt, synthetic construct
  source 1..23: mol_type = other RNA
ttatctccaaactgatgaacatg

SEQ ID NO: 175 - RNA, 23 nt, synthetic construct
  source 1..23: mol_type = other RNA
aattaaagtgaggacctgcactg

SEQ ID NO: 176 - RNA, 23 nt, synthetic construct
  source 1..23: mol_type = other RNA
aacaccttcactggtccattact

SEQ ID NO: 177 - RNA, 23 nt, synthetic construct
  source 1..23: mol_type = other RNA
attgtctggatagaggattaaag

SEQ ID NO: 178 - RNA, 23 nt, synthetic construct
  source 1..23: mol_type = other RNA
aatgatggaatggtctcctgaga

SEQ ID NO: 179 - RNA, 23 nt, synthetic construct
  source 1..23: mol_type = other RNA
ttctgctcgaaattgatggtgcc

SEQ ID NO: 180 - RNA, 23 nt, synthetic construct
  source 1..23: mol_type = other RNA
aggattaaagtgaggacctgcac

SEQ ID NO: 181 - RNA, 23 nt, synthetic construct
  source 1..23: mol_type = other RNA
aagatcacagaatcttcgaaaga

SEQ ID NO: 182 - RNA, 23 nt, synthetic construct
  source 1..23: mol_type = other RNA
aatgaacatggaatccatgcagg

SEQ ID NO: 183 - RNA, 23 nt, synthetic construct
  source 1..23: mol_type = other RNA
agtgttgtctggatagaggatta

SEQ ID NO: 184 - RNA, 23 nt, synthetic construct
  source 1..23: mol_type = other RNA
aagagcgagatcacagaatcttc

SEQ ID NO: 185 - RNA, 23 nt, synthetic construct
  source 1..23: mol_type = other RNA
atctccaacatgcctctcttcat

SEQ ID NO: 186 - RNA, 23 nt, synthetic construct
  source 1..23: mol_type = other RNA
ttcatttccacctttgcccaagt

SEQ ID NO: 187 - RNA, 23 nt, synthetic construct
  source 1..23: mol_type = other RNA
tttccttctgctcgaaattgatg

SEQ ID NO: 188 - RNA, 23 nt, synthetic construct
  source 1..23: mol_type = other RNA
aaagtcatctgctttttcatgga

SEQ ID NO: 189 - RNA, 23 nt, synthetic construct
  source 1..23: mol_type = other RNA
aactgatgaacatggaatccatg

SEQ ID NO: 190 - RNA, 23 nt, synthetic construct
  source 1..23: mol_type = other RNA
aaggtctccaacatgcctctctt

SEQ ID NO: 191 - RNA, 23 nt, synthetic construct
  source 1..23: mol_type = other RNA
aagcgagatcacagaatcttcga

SEQ ID NO: 192 - RNA, 23 nt, synthetic construct
  source 1..23: mol_type = other RNA
tgtgtattatctccaaactgatg

SEQ ID NO: 193 - RNA, 23 nt, synthetic construct
  source 1..23: mol_type = other RNA
aaatcttcgaaagacaccttggc

SEQ ID NO: 194 - RNA, 23 nt, synthetic construct
  source 1..23: mol_type = other RNA
tatctccaaactgatgaacatgg

SEQ ID NO: 195 - RNA, 23 nt, synthetic construct
  source 1..23: mol_type = other RNA
attctgctcgaaattgatggtgc

SEQ ID NO: 196 - RNA, 23 nt, synthetic construct
  source 1..23: mol_type = other RNA
aatctttgccagcagtcacattg

SEQ ID NO: 197 - RNA, 23 nt, synthetic construct
  source 1..23: mol_type = other RNA
tttactttcttcatttccacctt

SEQ ID NO: 198 - RNA, 23 nt, synthetic construct
  source 1..23: mol_type = other RNA
aaactgatgaacatggaatccat

SEQ ID NO: 199 - RNA, 23 nt, synthetic construct
  source 1..23: mol_type = other RNA
atctttgccagcagtcacattgc

SEQ ID NO: 200 - RNA, 23 nt, synthetic construct
  source 1..23: mol_type = other RNA
atcatctgctttttcatggacca

SEQ ID NO: 201 - RNA, 21 nt, synthetic construct
  source 1..21: mol_type = other RNA
  modified_base 1: mod_base = OTHER; note = 2'-O-methyladenosine-3'-phosphorothioate
  modified_base 2: mod_base = OTHER; note = 2'-O-methyluridine-3'-phosphorothioate
  modified_base 3: mod_base = OTHER; note = 2'-O-methylcytidine-3'-phosphate
  modified_base 4: mod_base = OTHER; note = 2'-O-methyladenosine-3'-phosphate
  modified_base 5: mod_base = OTHER; note = 2'-O-methylguanosine-3'-phosphate
  modified_base 6: mod_base = OTHER; note = 2'-O-methyluridine-3'-phosphate
  modified_base 7: mod_base = OTHER; note = 2'-deoxy-2'-fluorouridine-3'-phosphate
  modified_base 8: mod_base = OTHER; note = 2'-O-methyluridine-3'-phosphate
  modified_base 9: mod_base = OTHER; note = 2'-deoxy-2'-fluoroguanosine-3'-phosphate
  modified_base 10: mod_base = OTHER; note = 2'-deoxy-2'-fluoroguanosine-3'-phosphate
  modified_base 11: mod_base = OTHER; note = 2'-deoxy-2'-fluoroadenosine-3'-phosphate
  modified_base 12: mod_base = OTHER; note = 2'-O-methylguanosine-3'-phosphate
  modified_base 13: mod_base = OTHER; note = 2'-O-methyladenosine-3'-phosphate
  modified_base 14: mod_base = OTHER; note = 2'-O-methyluridine-3'-phosphate
  modified_base 15: mod_base = OTHER; note = 2'-O-methyladenosine-3'-phosphate
  modified_base 16: mod_base = OTHER; note = 2'-O-methyladenosine-3'-phosphate
  modified_base 17: mod_base = OTHER; note = 2'-O-methyluridine-3'-phosphate
  modified_base 18: mod_base = OTHER; note = 2'-O-methyladenosine-3'-phosphate
  modified_base 19: mod_base = OTHER; note = 2'-O-methylcytidine-3'-phosphate
  modified_base 20: mod_base = OTHER; note = 2'-O-methyladenosine-3'-phosphate
  modified_base 21: mod_base = OTHER; note = 2'-O-methyluridine-3'-phosphate ((2S,4R)-1-[29-[[2-(acetylamino)-2-deoxy-beta-D-galactopyra nosyl]oxy]-14,14-bis[[3-[[3-[[5-[[2-(acetylamino)-2-deoxy-b eta-D-galactopyranosyl]oxy]-1-oxopentyl]amino]propyl]amino] -3-oxopropoxy]methyl]-1,12,19,25-tetraoxo-16-oxa-13,20,24-t riazanonacos-1-yl]-4-hydroxy-2-pyrrolidinyl)methyl ester
atcagtttggagataatacat

SEQ ID NO: 202 - RNA, 21 nt, synthetic construct
  source 1..21: mol_type = other RNA
  modified_base 1: mod_base = OTHER; note = 2'-O-methyluridine-3'-phosphorothioate
  modified_base 2: mod_base = OTHER; note = 2'-O-methylcytidine-3'-phosphorothioate
  modified_base 3: mod_base = OTHER; note = 2'-O-methyluridine-3'-phosphate
  modified_base 4: mod_base = OTHER; note = 2'-O-methyluridine-3'-phosphate
  modified_base 5: mod_base = OTHER; note = 2'-O-methyluridine-3'-phosphate
  modified_base 6: mod_base = OTHER; note = 2'-O-methylcytidine-3'-phosphate
  modified_base 7: mod_base = OTHER; note = 2'-deoxy-2'-fluoroguanosine-3'-phosphate
  modified_base 8: mod_base = OTHER; note = 2'-O-methyladenosine-3'-phosphate
  modified_base 9: mod_base = OTHER; note = 2'-deoxy-2'-fluoroadenosine-3'-phosphate
  modified_base 10: mod_base = OTHER; note = 2'-deoxy-2'-fluoroguanosine-3'-phosphate
  modified_base 11: mod_base = OTHER; note = 2'-deoxy-2'-fluoroadenosine-3'-phosphate
  modified_base 12: mod_base = OTHER; note = 2'-O-methyluridine-3'-phosphate
  modified_base 13: mod_base = OTHER; note = 2'-O-methyluridine-3'-phosphate
  modified_base 14: mod_base = OTHER; note = 2'-O-methylcytidine-3'-phosphate
  modified_base 15: mod_base = OTHER; note = 2'-O-methyluridine-3'-phosphate
  modified_base 16: mod_base = OTHER; note = 2'-O-methylguanosine-3'-phosphate
  modified_base 17: mod_base = OTHER; note = 2'-O-methyluridine-3'-phosphate
  modified_base 18: mod_base = OTHER; note = 2'-O-methylguanosine-3'-phosphate
  modified_base 19: mod_base = OTHER; note = 2'-O-methyladenosine-3'-phosphate
  modified_base 20: mod_base = OTHER; note = 2'-O-methyluridine-3'-phosphate
  modified_base 21: mod_base = OTHER; note = 2'-O-methyluridine-3'-phosphate ((2S,4R)-1-[29-[[2-(acetylamino)-2-deoxy-beta-D-galactopyra nosyl]oxy]-14,14-bis[[3-[[3-[[5-[[2-(acetylamino)-2-deoxy-b eta-D-galactopyranosyl]oxy]-1-oxopentyl]amino]propyl]amino] -3-oxopropoxy]methyl]-1,12,19,25-tetraoxo-16-oxa-13,20,24-t riazanonacos-1-yl]-4-hydroxy-2-pyrrolidinyl)methyl ester
tctttcgaagattctgtgatt

SEQ ID NO: 203 - RNA, 21 nt, synthetic construct
  source 1..21: mol_type = other RNA
  modified_base 1: mod_base = OTHER; note = 2'-O-methyladenosine-3'-phosphorothioate
  modified_base 2: mod_base = OTHER; note = 2'-O-methylguanosine-3'-phosphorothioate
  modified_base 3: mod_base = OTHER; note = 2'-O-methylguanosine-3'-phosphate
  modified_base 4: mod_base = OTHER; note = 2'-O-methyluridine-3'-phosphate
  modified_base 5: mod_base = OTHER; note = 2'-O-methylguanosine-3'-phosphate
  modified_base 6: mod_base = OTHER; note = 2'-O-methyluridine-3'-phosphate
  modified_base 7: mod_base = OTHER; note = 2'-deoxy-2'-fluorocytidine-3'-phosphate
  modified_base 8: mod_base = OTHER; note = 2'-O-methyluridine-3'-phosphate
  modified_base 9: mod_base = OTHER; note = 2'-deoxy-2'-fluorouridine-3'-phosphate
  modified_base 10: mod_base = OTHER; note = 2'-deoxy-2'-fluorouridine-3'-phosphate
  modified_base 11: mod_base = OTHER; note = 2'-deoxy-2'-fluorocytidine-3'-phosphate
  modified_base 12: mod_base = OTHER; note = 2'-O-methylguanosine-3'-phosphate
  modified_base 13: mod_base = OTHER; note = 2'-O-methyladenosine-3'-phosphate
  modified_base 14: mod_base = OTHER; note = 2'-O-methyladenosine-3'-phosphate
  modified_base 15: mod_base = OTHER; note = 2'-O-methylguanosine-3'-phosphate
  modified_base 16: mod_base = OTHER; note = 2'-O-methyladenosine-3'-phosphate
  modified_base 17: mod_base = OTHER; note = 2'-O-methyluridine-3'-phosphate
  modified_base 18: mod_base = OTHER; note = 2'-O-methyluridine-3'-phosphate
  modified_base 19: mod_base = OTHER; note = 2'-O-methylcytidine-3'-phosphate
  modified_base 20: mod_base = OTHER; note = 2'-O-methyluridine-3'-phosphate
  modified_base 21: mod_base = OTHER; note = 2'-O-methyluridine-3'-phosphate ((2S,4R)-1-[29-[[2-(acetylamino)-2-deoxy-beta-D-galactopyra nosyl]oxy]-14,14-bis[[3-[[3-[[5-[[2-(acetylamino)-2-deoxy-b eta-D-galactopyranosyl]oxy]-1-oxopentyl]amino]propyl]amino] -3-oxopropoxy]methyl]-1,12,19,25-tetraoxo-16-oxa-13,20,24-t riazanonacos-1-yl]-4-hydroxy-2-pyrrolidinyl)methyl ester
aggtgtctttcgaagattctt

SEQ ID NO: 204 - RNA, 21 nt, synthetic construct
  source 1..21: mol_type = other RNA
  modified_base 1: mod_base = OTHER; note = 2'-O-methylcytidine-3'-phosphorothioate
  modified_base 2: mod_base = OTHER; note = 2'-O-methyluridine-3'-phosphorothioate
  modified_base 3: mod_base = OTHER; note = 2'-O-methyluridine-3'-phosphate
  modified_base 4: mod_base = OTHER; note = 2'-O-methyluridine-3'-phosphate
  modified_base 5: mod_base = OTHER; note = 2'-O-methyladenosine-3'-phosphate
  modified_base 6: mod_base = OTHER; note = 2'-O-methyladenosine-3'-phosphate
  modified_base 7: mod_base = OTHER; note = 2'-deoxy-2'-fluorouridine-3'-phosphate
  modified_base 8: mod_base = OTHER; note = 2'-O-methylcytidine-3'-phosphate
  modified_base 9: mod_base = OTHER; note = 2'-deoxy-2'-fluorocytidine-3'-phosphate
  modified_base 10: mod_base = OTHER; note = 2'-deoxy-2'-fluorouridine-3'-phosphate
  modified_base 11: mod_base = OTHER; note = 2'-deoxy-2'-fluorocytidine-3'-phosphate
  modified_base 12: mod_base = OTHER; note = 2'-O-methyluridine-3'-phosphate
  modified_base 13: mod_base = OTHER; note = 2'-O-methyladenosine-3'-phosphate
  modified_base 14: mod_base = OTHER; note = 2'-O-methyluridine-3'-phosphate
  modified_base 15: mod_base = OTHER; note = 2'-O-methylcytidine-3'-phosphate
  modified_base 16: mod_base = OTHER; note = 2'-O-methylcytidine-3'-phosphate
  modified_base 17: mod_base = OTHER; note = 2'-O-methyladenosine-3'-phosphate
  modified_base 18: mod_base = OTHER; note = 2'-O-methylguanosine-3'-phosphate
  modified_base 19: mod_base = OTHER; note = 2'-O-methyladenosine-3'-phosphate
  modified_base 20: mod_base = OTHER; note = 2'-O-methylcytidine-3'-phosphate
  modified_base 21: mod_base = OTHER; note = 2'-O-methyladenosine-3'-phosphate ((2S,4R)-1-[29-[[2-(acetylamino)-2-deoxy-beta-D-galactopyra nosyl]oxy]-14,14-bis[[3-[[3-[[5-[[2-(acetylamino)-2-deoxy-b eta-D-galactopyranosyl]oxy]-1-oxopentyl]amino]propyl]amino] -3-oxopropoxy]methyl]-1,12,19,25-tetraoxo-16-oxa-13,20,24-t riazanonacos-1-yl]-4-hydroxy-2-pyrrolidinyl)methyl ester
ctttaatcctctatccagaca

SEQ ID NO: 205 - RNA, 21 nt, synthetic construct
  source 1..21: mol_type = other RNA
  modified_base 1: mod_base = OTHER; note = 2'-O-methyluridine-3'-phosphorothioate
  modified_base 2: mod_base = OTHER; note = 2'-O-methylguanosine-3'-phosphorothioate
  modified_base 3: mod_base = OTHER; note = 2'-O-methylcytidine-3'-phosphate
  modified_base 4: mod_base = OTHER; note = 2'-O-methyladenosine-3'-phosphate
  modified_base 5: mod_base = OTHER; note = 2'-O-methylguanosine-3'-phosphate
  modified_base 6: mod_base = OTHER; note = 2'-O-methylguanosine-3'-phosphate
  modified_base 7: mod_base = OTHER; note = 2'-deoxy-2'-fluorouridine-3'-phosphate
  modified_base 8: mod_base = OTHER; note = 2'-O-methylcytidine-3'-phosphate
  modified_base 9: mod_base = OTHER; note = 2'-deoxy-2'-fluorocytidine-3'-phosphate
  modified_base 10: mod_base = OTHER; note = 2'-deoxy-2'-fluorouridine-3'-phosphate
  modified_base 11: mod_base = OTHER; note = 2'-deoxy-2'-fluorocytidine-3'-phosphate
  modified_base 12: mod_base = OTHER; note = 2'-O-methyladenosine-3'-phosphate
  modified_base 13: mod_base = OTHER; note = 2'-O-methylcytidine-3'-phosphate
  modified_base 14: mod_base = OTHER; note = 2'-O-methyluridine-3'-phosphate
  modified_base 15: mod_base = OTHER; note = 2'-O-methyluridine-3'-phosphate
  modified_base 16: mod_base = OTHER; note = 2'-O-methyluridine-3'-phosphate
  modified_base 17: mod_base = OTHER; note = 2'-O-methyladenosine-3'-phosphate
  modified_base 18: mod_base = OTHER; note = 2'-O-methyladenosine-3'-phosphate
  modified_base 19: mod_base = OTHER; note = 2'-O-methyluridine-3'-phosphate
  modified_base 20: mod_base = OTHER; note = 2'-O-methylcytidine-3'-phosphate
  modified_base 21: mod_base = OTHER; note = 2'-O-methyluridine-3'-phosphate ((2S,4R)-1-[29-[[2-(acetylamino)-2-deoxy-beta-D-galactopyra nosyl]oxy]-14,14-bis[[3-[[3-[[5-[[2-(acetylamino)-2-deoxy-b eta-D-galactopyranosyl]oxy]-1-oxopentyl]amino]propyl]amino] -3-oxopropoxy]methyl]-1,12,19,25-tetraoxo-16-oxa-13,20,24-t riazanonacos-1-yl]-4-hydroxy-2-pyrrolidinyl)methyl ester
tgcaggtcctcactttaatct

SEQ ID NO: 206 - RNA, 21 nt, synthetic construct
  source 1..21: mol_type = other RNA
  modified_base 1: mod_base = OTHER; note = 2'-O-methylguanosine-3'-phosphorothioate
  modified_base 2: mod_base = OTHER; note = 2'-O-methyluridine-3'-phosphorothioate
  modified_base 3: mod_base = OTHER; note = 2'-O-methylcytidine-3'-phosphate
  modified_base 4: mod_base = OTHER; note = 2'-O-methyluridine-3'-phosphate
  modified_base 5: mod_base = OTHER; note = 2'-O-methyluridine-3'-phosphate
  modified_base 6: mod_base = OTHER; note = 2'-O-methyluridine-3'-phosphate
  modified_base 7: mod_base = OTHER; note = 2'-deoxy-2'-fluorocytidine-3'-phosphate
  modified_base 8: mod_base = OTHER; note = 2'-O-methylguanosine-3'-phosphate
  modified_base 9: mod_base = OTHER; note = 2'-deoxy-2'-fluoroadenosine-3'-phosphate
  modified_base 10: mod_base = OTHER; note = 2'-deoxy-2'-fluoroadenosine-3'-phosphate
  modified_base 11: mod_base = OTHER; note = 2'-deoxy-2'-fluoroguanosine-3'-phosphate
  modified_base 12: mod_base = OTHER; note = 2'-O-methyladenosine-3'-phosphate
  modified_base 13: mod_base = OTHER; note = 2'-O-methyluridine-3'-phosphate
  modified_base 14: mod_base = OTHER; note = 2'-O-methyluridine-3'-phosphate
  modified_base 15: mod_base = OTHER; note = 2'-O-methylcytidine-3'-phosphate
  modified_base 16: mod_base = OTHER; note = 2'-O-methyluridine-3'-phosphate
  modified_base 17: mod_base = OTHER; note = 2'-O-methylguanosine-3'-phosphate
  modified_base 18: mod_base = OTHER; note = 2'-O-methyluridine-3'-phosphate
  modified_base 19: mod_base = OTHER; note = 2'-O-methylguanosine-3'-phosphate
  modified_base 20: mod_base = OTHER; note = 2'-O-methyladenosine-3'-phosphate
  modified_base 21: mod_base = OTHER; note = 2'-O-methyluridine-3'-phosphate ((2S,4R)-1-[29-[[2-(acetylamino)-2-deoxy-beta-D-galactopyra nosyl]oxy]-14,14-bis[[3-[[3-[[5-[[2-(acetylamino)-2-deoxy-b eta-D-galactopyranosyl]oxy]-1-oxopentyl]amino]propyl]amino] -3-oxopropoxy]methyl]-1,12,19,25-tetraoxo-16-oxa-13,20,24-t riazanonacos-1-yl]-4-hydroxy-2-pyrrolidinyl)methyl ester
gtctttcgaagattctgtgat

SEQ ID NO: 207 - RNA, 21 nt, synthetic construct
  source 1..21: mol_type = other RNA
  modified_base 1: mod_base = OTHER; note = 2'-O-methylcytidine-3'-phosphorothioate
  modified_base 2: mod_base = OTHER; note = 2'-O-methyladenosine-3'-phosphorothioate
  modified_base 3: mod_base = OTHER; note = 2'-O-methylguanosine-3'-phosphate
  modified_base 4: mod_base = OTHER; note = 2'-O-methylguanosine-3'-phosphate
  modified_base 5: mod_base = OTHER; note = 2'-O-methyluridine-3'-phosphate
  modified_base 6: mod_base = OTHER; note = 2'-O-methylcytidine-3'-phosphate
  modified_base 7: mod_base = OTHER; note = 2'-deoxy-2'-fluorocytidine-3'-phosphate
  modified_base 8: mod_base = OTHER; note = 2'-O-methyluridine-3'-phosphate
  modified_base 9: mod_base = OTHER; note = 2'-deoxy-2'-fluorocytidine-3'-phosphate
  modified_base 10: mod_base = OTHER; note = 2'-deoxy-2'-fluoroadenosine-3'-phosphate
  modified_base 11: mod_base = OTHER; note = 2'-deoxy-2'-fluorocytidine-3'-phosphate
  modified_base 12: mod_base = OTHER; note = 2'-O-methyluridine-3'-phosphate
  modified_base 13: mod_base = OTHER; note = 2'-O-methyluridine-3'-phosphate
  modified_base 14: mod_base = OTHER; note = 2'-O-methyluridine-3'-phosphate
  modified_base 15: mod_base = OTHER; note = 2'-O-methyladenosine-3'-phosphate
  modified_base 16: mod_base = OTHER; note = 2'-O-methyladenosine-3'-phosphate
  modified_base 17: mod_base = OTHER; note = 2'-O-methyluridine-3'-phosphate
  modified_base 18: mod_base = OTHER; note = 2'-O-methylcytidine-3'-phosphate
  modified_base 19: mod_base = OTHER; note = 2'-O-methylcytidine-3'-phosphate
  modified_base 20: mod_base = OTHER; note = 2'-O-methyluridine-3'-phosphate
  modified_base 21: mod_base = OTHER; note = 2'-O-methyluridine-3'-phosphate ((2S,4R)-1-[29-[[2-(acetylamino)-2-deoxy-beta-D-galactopyra nosyl]oxy]-14,14-bis[[3-[[3-[[5-[[2-(acetylamino)-2-deoxy-b eta-D-galactopyranosyl]oxy]-1-oxopentyl]amino]propyl]amino] -3-oxopropoxy]methyl]-1,12,19,25-tetraoxo-16-oxa-13,20,24-t riazanonacos-1-yl]-4-hydroxy-2-pyrrolidinyl)methyl ester
caggtcctcactttaatcctt

SEQ ID NO: 208 - RNA, 21 nt, synthetic construct
  source 1..21: mol_type = other RNA
  modified_base 1: mod_base = OTHER; note = 2'-O-methylcytidine-3'-phosphorothioate
  modified_base 2: mod_base = OTHER; note = 2'-O-methylcytidine-3'-phosphorothioate
  modified_base 3: mod_base = OTHER; note = 2'-O-methyluridine-3'-phosphate
  modified_base 4: mod_base = OTHER; note = 2'-O-methylcytidine-3'-phosphate
  modified_base 5: mod_base = OTHER; note = 2'-O-methyladenosine-3'-phosphate
  modified_base 6: mod_base = OTHER; note = 2'-O-methylcytidine-3'-phosphate
  modified_base 7: mod_base = OTHER; note = 2'-deoxy-2'-fluorouridine-3'-phosphate
  modified_base 8: mod_base = OTHER; note = 2'-O-methyluridine-3'-phosphate
  modified_base 9: mod_base = OTHER; note = 2'-deoxy-2'-fluorouridine-3'-phosphate
  modified_base 10: mod_base = OTHER; note = 2'-deoxy-2'-fluoroadenosine-3'-phosphate
  modified_base 11: mod_base = OTHER; note = 2'-deoxy-2'-fluoroadenosine-3'-phosphate
  modified_base 12: mod_base = OTHER; note = 2'-O-methyluridine-3'-phosphate
  modified_base 13: mod_base = OTHER; note = 2'-O-methylcytidine-3'-phosphate
  modified_base 14: mod_base = OTHER; note = 2'-O-methylcytidine-3'-phosphate
  modified_base 15: mod_base = OTHER; note = 2'-O-methyluridine-3'-phosphate
  modified_base 16: mod_base = OTHER; note = 2'-O-methylcytidine-3'-phosphate
  modified_base 17: mod_base = OTHER; note = 2'-O-methyluridine-3'-phosphate
  modified_base 18: mod_base = OTHER; note = 2'-O-methyladenosine-3'-phosphate
  modified_base 19: mod_base = OTHER; note = 2'-O-methyluridine-3'-phosphate
  modified_base 20: mod_base = OTHER; note = 2'-O-methylcytidine-3'-phosphate
  modified_base 21: mod_base = OTHER; note = 2'-O-methyluridine-3'-phosphate ((2S,4R)-1-[29-[[2-(acetylamino)-2-deoxy-beta-D-galactopyra nosyl]oxy]-14,14-bis[[3-[[3-[[5-[[2-(acetylamino)-2-deoxy-b eta-D-galactopyranosyl]oxy]-1-oxopentyl]amino]propyl]amino] -3-oxopropoxy]methyl]-1,12,19,25-tetraoxo-16-oxa-13,20,24-t riazanonacos-1-yl]-4-hydroxy-2-pyrrolidinyl)methyl ester
cctcactttaatcctctatct

SEQ ID NO: 209 - RNA, 21 nt, synthetic construct
  source 1..21: mol_type = other RNA
  modified_base 1: mod_base = OTHER; note = 2'-O-methyladenosine-3'-phosphorothioate
  modified_base 2: mod_base = OTHER; note = 2'-O-methylcytidine-3'-phosphorothioate
  modified_base 3: mod_base = OTHER; note = 2'-O-methylcytidine-3'-phosphate
  modified_base 4: mod_base = OTHER; note = 2'-O-methyladenosine-3'-phosphate
  modified_base 5: mod_base = OTHER; note = 2'-O-methylguanosine-3'-phosphate
  modified_base 6: mod_base = OTHER; note = 2'-O-methyluridine-3'-phosphate
  modified_base 7: mod_base = OTHER; note = 2'-deoxy-2'-fluoroguanosine-3'-phosphate
  modified_base 8: mod_base = OTHER; note = 2'-O-methylcytidine-3'-phosphate
  modified_base 9: mod_base = OTHER; note = 2'-deoxy-2'-fluoroadenosine-3'-phosphate
  modified_base 10: mod_base = OTHER; note = 2'-deoxy-2'-fluoroguanosine-3'-phosphate
  modified_base 11: mod_base = OTHER; note = 2'-deoxy-2'-fluoroguanosine-3'-phosphate
  modified_base 12: mod_base = OTHER; note = 2'-O-methyluridine-3'-phosphate
  modified_base 13: mod_base = OTHER; note = 2'-O-methylcytidine-3'-phosphate
  modified_base 14: mod_base = OTHER; note = 2'-O-methylcytidine-3'-phosphate
  modified_base 15: mod_base = OTHER; note = 2'-O-methyluridine-3'-phosphate
  modified_base 16: mod_base = OTHER; note = 2'-O-methylcytidine-3'-phosphate
  modified_base 17: mod_base = OTHER; note = 2'-O-methyladenosine-3'-phosphate
  modified_base 18: mod_base = OTHER; note = 2'-O-methylcytidine-3'-phosphate
  modified_base 19: mod_base = OTHER; note = 2'-O-methyluridine-3'-phosphate
  modified_base 20: mod_base = OTHER; note = 2'-O-methyluridine-3'-phosphate
  modified_base 21: mod_base = OTHER; note = 2'-O-methyluridine-3'-phosphate ((2S,4R)-1-[29-[[2-(acetylamino)-2-deoxy-beta-D-galactopyra nosyl]oxy]-14,14-bis[[3-[[3-[[5-[[2-(acetylamino)-2-deoxy-b eta-D-galactopyranosyl]oxy]-1-oxopentyl]amino]propyl]amino] -3-oxopropoxy]methyl]-1,12,19,25-tetraoxo-16-oxa-13,20,24-t riazanonacos-1-yl]-4-hydroxy-2-pyrrolidinyl)methyl ester
accagtgcaggtcctcacttt

SEQ ID NO: 210 - RNA, 21 nt, synthetic construct
  source 1..21: mol_type = other RNA
  modified_base 1: mod_base = OTHER; note = 2'-O-methyladenosine-3'-phosphorothioate
  modified_base 2: mod_base = OTHER; note = 2'-O-methylguanosine-3'-phosphorothioate
  modified_base 3: mod_base = OTHER; note = 2'-O-methylcytidine-3'-phosphate
  modified_base 4: mod_base = OTHER; note = 2'-O-methyladenosine-3'-phosphate
  modified_base 5: mod_base = OTHER; note = 2'-O-methylguanosine-3'-phosphate
  modified_base 6: mod_base = OTHER; note = 2'-O-methyladenosine-3'-phosphate
  modified_base 7: mod_base = OTHER; note = 2'-deoxy-2'-fluorouridine-3'-phosphate
  modified_base 8: mod_base = OTHER; note = 2'-O-methylguanosine-3'-phosphate
  modified_base 9: mod_base = OTHER; note = 2'-deoxy-2'-fluoroadenosine-3'-phosphate
  modified_base 10: mod_base = OTHER; note = 2'-deoxy-2'-fluorocytidine-3'-phosphate
  modified_base 11: mod_base = OTHER; note = 2'-deoxy-2'-fluorouridine-3'-phosphate
  modified_base 12: mod_base = OTHER; note = 2'-O-methyluridine-3'-phosphate
  modified_base 13: mod_base = OTHER; note = 2'-O-methylguanosine-3'-phosphate
  modified_base 14: mod_base = OTHER; note = 2'-O-methylguanosine-3'-phosphate
  modified_base 15: mod_base = OTHER; note = 2'-O-methylguanosine-3'-phosphate
  modified_base 16: mod_base = OTHER; note = 2'-O-methylcytidine-3'-phosphate
  modified_base 17: mod_base = OTHER; note = 2'-O-methyladenosine-3'-phosphate
  modified_base 18: mod_base = OTHER; note = 2'-O-methyladenosine-3'-phosphate
  modified_base 19: mod_base = OTHER; note = 2'-O-methyladenosine-3'-phosphate
  modified_base 20: mod_base = OTHER; note = 2'-O-methylguanosine-3'-phosphate
  modified_base 21: mod_base = OTHER; note = 2'-O-methyluridine-3'-phosphate ((2S,4R)-1-[29-[[2-(acetylamino)-2-deoxy-beta-D-galactopyra nosyl]oxy]-14,14-bis[[3-[[3-[[5-[[2-(acetylamino)-2-deoxy-b eta-D-galactopyranosyl]oxy]-1-oxopentyl]amino]propyl]amino] -3-oxopropoxy]methyl]-1,12,19,25-tetraoxo-16-oxa-13,20,24-t riazanonacos-1-yl]-4-hydroxy-2-pyrrolidinyl)methyl ester
agcagatgacttgggcaaagt

SEQ ID NO: 211 - RNA, 21 nt, synthetic construct
  source 1..21: mol_type = other RNA
  modified_base 1: mod_base = OTHER; note = 2'-O-methylguanosine-3'-phosphorothioate
  modified_base 2: mod_base = OTHER; note = 2'-O-methyladenosine-3'-phosphorothioate
  modified_base 3: mod_base = OTHER; note = 2'-O-methyladenosine-3'-phosphate
  modified_base 4: mod_base = OTHER; note = 2'-O-methyladenosine-3'-phosphate
  modified_base 5: mod_base = OTHER; note = 2'-O-methyladenosine-3'-phosphate
  modified_base 6: mod_base = OTHER; note = 2'-O-methyladenosine-3'-phosphate
  modified_base 7: mod_base = OTHER; note = 2'-deoxy-2'-fluoroguanosine-3'-phosphate
  modified_base 8: mod_base = OTHER; note = 2'-O-methylcytidine-3'-phosphate
  modified_base 9: mod_base = OTHER; note = 2'-deoxy-2'-fluoroadenosine-3'-phosphate
  modified_base 10: mod_base = OTHER; note = 2'-deoxy-2'-fluoroguanosine-3'-phosphate
  modified_base 11: mod_base = OTHER; note = 2'-deoxy-2'-fluoroadenosine-3'-phosphate
  modified_base 12: mod_base = OTHER; note = 2'-O-methyluridine-3'-phosphate
  modified_base 13: mod_base = OTHER; note = 2'-O-methylguanosine-3'-phosphate
  modified_base 14: mod_base = OTHER; note = 2'-O-methyladenosine-3'-phosphate
  modified_base 15: mod_base = OTHER; note = 2'-O-methylcytidine-3'-phosphate
  modified_base 16: mod_base = OTHER; note = 2'-O-methyluridine-3'-phosphate
  modified_base 17: mod_base = OTHER; note = 2'-O-methyluridine-3'-phosphate
  modified_base 18: mod_base = OTHER; note = 2'-O-methylguanosine-3'-phosphate
  modified_base 19: mod_base = OTHER; note = 2'-O-methylguanosine-3'-phosphate
  modified_base 20: mod_base = OTHER; note = 2'-O-methylguanosine-3'-phosphate
  modified_base 21: mod_base = OTHER; note = 2'-O-methyluridine-3'-phosphate ((2S,4R)-1-[29-[[2-(acetylamino)-2-deoxy-beta-D-galactopyra nosyl]oxy]-14,14-bis[[3-[[3-[[5-[[2-(acetylamino)-2-deoxy-b eta-D-galactopyranosyl]oxy]-1-oxopentyl]amino]propyl]amino] -3-oxopropoxy]methyl]-1,12,19,25-tetraoxo-16-oxa-13,20,24-t riazanonacos-1-yl]-4-hydroxy-2-pyrrolidinyl)methyl ester
gaaaaagcagatgacttgggt

SEQ ID NO: 212 - RNA, 21 nt, synthetic construct
  source 1..21: mol_type = other RNA
  modified_base 1: mod_base = OTHER; note = 2'-O-methyluridine-3'-phosphorothioate
  modified_base 2: mod_base = OTHER; note = 2'-O-methyluridine-3'-phosphorothioate
  modified_base 3: mod_base = OTHER; note = 2'-O-methylcytidine-3'-phosphate
  modified_base 4: mod_base = OTHER; note = 2'-O-methylguanosine-3'-phosphate
  modified_base 5: mod_base = OTHER; note = 2'-O-methyladenosine-3'-phosphate
  modified_base 6: mod_base = OTHER; note = 2'-O-methylguanosine-3'-phosphate
  modified_base 7: mod_base = OTHER; note = 2'-deoxy-2'-fluorocytidine-3'-phosphate
  modified_base 8: mod_base = OTHER; note = 2'-O-methyladenosine-3'-phosphate
  modified_base 9: mod_base = OTHER; note = 2'-deoxy-2'-fluoroguanosine-3'-phosphate
  modified_base 10: mod_base = OTHER; note = 2'-deoxy-2'-fluoroadenosine-3'-phosphate
  modified_base 11: mod_base = OTHER; note = 2'-deoxy-2'-fluoroadenosine-3'-phosphate
  modified_base 12: mod_base = OTHER; note = 2'-O-methylguanosine-3'-phosphate
  modified_base 13: mod_base = OTHER; note = 2'-O-methylguanosine-3'-phosphate
  modified_base 14: mod_base = OTHER; note = 2'-O-methyladenosine-3'-phosphate
  modified_base 15: mod_base = OTHER; note = 2'-O-methyladenosine-3'-phosphate
  modified_base 16: mod_base = OTHER; note = 2'-O-methyladenosine-3'-phosphate
  modified_base 17: mod_base = OTHER; note = 2'-O-methylguanosine-3'-phosphate
  modified_base 18: mod_base = OTHER; note = 2'-O-methyluridine-3'-phosphate
  modified_base 19: mod_base = OTHER; note = 2'-O-methyladenosine-3'-phosphate
  modified_base 20: mod_base = OTHER; note = 2'-O-methyladenosine-3'-phosphate
  modified_base 21: mod_base = OTHER; note = 2'-O-methyluridine-3'-phosphate ((2S,4R)-1-[29-[[2-(acetylamino)-2-deoxy-beta-D-galactopyra nosyl]oxy]-14,14-bis[[3-[[3-[[5-[[2-(acetylamino)-2-deoxy-b eta-D-galactopyranosyl]oxy]-1-oxopentyl]amino]propyl]amino] -3-oxopropoxy]methyl]-1,12,19,25-tetraoxo-16-oxa-13,20,24-t riazanonacos-1-yl]-4-hydroxy-2-pyrrolidinyl)methyl ester
ttcgagcagaaggaaagtaat

SEQ ID NO: 213 - RNA, 21 nt, synthetic construct
  source 1..21: mol_type = other RNA
  modified_base 1: mod_base = OTHER; note = 2'-O-methyladenosine-3'-phosphorothioate
  modified_base 2: mod_base = OTHER; note = 2'-O-methyluridine-3'-phosphorothioate
  modified_base 3: mod_base = OTHER; note = 2'-O-methyluridine-3'-phosphate
  modified_base 4: mod_base = OTHER; note = 2'-O-methyluridine-3'-phosphate
  modified_base 5: mod_base = OTHER; note = 2'-O-methylcytidine-3'-phosphate
  modified_base 6: mod_base = OTHER; note = 2'-O-methylguanosine-3'-phosphate
  modified_base 7: mod_base = OTHER; note = 2'-deoxy-2'-fluoroadenosine-3'-phosphate
  modified_base 8: mod_base = OTHER; note = 2'-O-methylguanosine-3'-phosphate
  modified_base 9: mod_base = OTHER; note = 2'-deoxy-2'-fluorocytidine-3'-phosphate
  modified_base 10: mod_base = OTHER; note = 2'-deoxy-2'-fluoroadenosine-3'-phosphate
  modified_base 11: mod_base = OTHER; note = 2'-deoxy-2'-fluoroguanosine-3'-phosphate
  modified_base 12: mod_base = OTHER; note = 2'-O-methyladenosine-3'-phosphate
  modified_base 13: mod_base = OTHER; note = 2'-O-methyladenosine-3'-phosphate
  modified_base 14: mod_base = OTHER; note = 2'-O-methylguanosine-3'-phosphate
  modified_base 15: mod_base = OTHER; note = 2'-O-methylguanosine-3'-phosphate
  modified_base 16: mod_base = OTHER; note = 2'-O-methyladenosine-3'-phosphate
  modified_base 17: mod_base = OTHER; note = 2'-O-methyladenosine-3'-phosphate
  modified_base 18: mod_base = OTHER; note = 2'-O-methyladenosine-3'-phosphate
  modified_base 19: mod_base = OTHER; note = 2'-O-methylguanosine-3'-phosphate
  modified_base 20: mod_base = OTHER; note = 2'-O-methyluridine-3'-phosphate
  modified_base 21: mod_base = OTHER; note = 2'-O-methyladenosine-3'-phosphate ((2S,4R)-1-[29-[[2-(acetylamino)-2-deoxy-beta-D-galactopyra nosyl]oxy]-14,14-bis[[3-[[3-[[5-[[2-(acetylamino)-2-deoxy-b eta-D-galactopyranosyl]oxy]-1-oxopentyl]amino]propyl]amino] -3-oxopropoxy]methyl]-1,12,19,25-tetraoxo-16-oxa-13,20,24-t riazanonacos-1-yl]-4-hydroxy-2-pyrrolidinyl)methyl ester
atttcgagcagaaggaaagta

SEQ ID NO: 214 - RNA, 21 nt, synthetic construct
  source 1..21: mol_type = other RNA
  modified_base 1: mod_base = OTHER; note = 2'-O-methylcytidine-3'-phosphorothioate
  modified_base 2: mod_base = OTHER; note = 2'-O-methyladenosine-3'-phosphorothioate
  modified_base 3: mod_base = OTHER; note = 2'-O-methylguanosine-3'-phosphate
  modified_base 4: mod_base = OTHER; note = 2'-O-methyluridine-3'-phosphate
  modified_base 5: mod_base = OTHER; note = 2'-O-methyluridine-3'-phosphate
  modified_base 6: mod_base = OTHER; note = 2'-O-methyluridine-3'-phosphate
  modified_base 7: mod_base = OTHER; note = 2'-deoxy-2'-fluoroguanosine-3'-phosphate
  modified_base 8: mod_base = OTHER; note = 2'-O-methylguanosine-3'-phosphate
  modified_base 9: mod_base = OTHER; note = 2'-deoxy-2'-fluoroadenosine-3'-phosphate
  modified_base 10: mod_base = OTHER; note = 2'-deoxy-2'-fluoroguanosine-3'-phosphate
  modified_base 11: mod_base = OTHER; note = 2'-deoxy-2'-fluoroadenosine-3'-phosphate
  modified_base 12: mod_base = OTHER; note = 2'-O-methyluridine-3'-phosphate
  modified_base 13: mod_base = OTHER; note = 2'-O-methyladenosine-3'-phosphate
  modified_base 14: mod_base = OTHER; note = 2'-O-methyladenosine-3'-phosphate
  modified_base 15: mod_base = OTHER; note = 2'-O-methyluridine-3'-phosphate
  modified_base 16: mod_base = OTHER; note = 2'-O-methyladenosine-3'-phosphate
  modified_base 17: mod_base = OTHER; note = 2'-O-methylcytidine-3'-phosphate
  modified_base 18: mod_base = OTHER; note = 2'-O-methyladenosine-3'-phosphate
  modified_base 19: mod_base = OTHER; note = 2'-O-methylcytidine-3'-phosphate
  modified_base 20: mod_base = OTHER; note = 2'-O-methyladenosine-3'-phosphate
  modified_base 21: mod_base = OTHER; note = 2'-O-methyladenosine-3'-phosphate ((2S,4R)-1-[29-[[2-(acetylamino)-2-deoxy-beta-D-galactopyra nosyl]oxy]-14,14-bis[[3-[[3-[[5-[[2-(acetylamino)-2-deoxy-b eta-D-galactopyranosyl]oxy]-1-oxopentyl]amino]propyl]amino] -3-oxopropoxy]methyl]-1,12,19,25-tetraoxo-16-oxa-13,20,24-t riazanonacos-1-yl]-4-hydroxy-2-pyrrolidinyl)methyl ester
cagtttggagataatacacaa

SEQ ID NO: 215 - RNA, 21 nt, synthetic construct
  source 1..21: mol_type = other RNA
  modified_base 1: mod_base = OTHER; note = 2'-O-methyluridine-3'-phosphorothioate
  modified_base 2: mod_base = OTHER; note = 2'-O-methyluridine-3'-phosphorothioate
  modified_base 3: mod_base = OTHER; note = 2'-O-methylcytidine-3'-phosphate
  modified_base 4: mod_base = OTHER; note = 2'-O-methyladenosine-3'-phosphate
  modified_base 5: mod_base = OTHER; note = 2'-O-methyluridine-3'-phosphate
  modified_base 6: mod_base = OTHER; note = 2'-O-methylcytidine-3'-phosphate
  modified_base 7: mod_base = OTHER; note = 2'-deoxy-2'-fluoroadenosine-3'-phosphate
  modified_base 8: mod_base = OTHER; note = 2'-O-methylguanosine-3'-phosphate
  modified_base 9: mod_base = OTHER; note = 2'-deoxy-2'-fluorouridine-3'-phosphate
  modified_base 10: mod_base = OTHER; note = 2'-deoxy-2'-fluorouridine-3'-phosphate
  modified_base 11: mod_base = OTHER; note = 2'-deoxy-2'-fluorouridine-3'-phosphate
  modified_base 12: mod_base = OTHER; note = 2'-O-methylguanosine-3'-phosphate
  modified_base 13: mod_base = OTHER; note = 2'-O-methylguanosine-3'-phosphate
  modified_base 14: mod_base = OTHER; note = 2'-O-methyladenosine-3'-phosphate
  modified_base 15: mod_base = OTHER; note = 2'-O-methylguanosine-3'-phosphate
  modified_base 16: mod_base = OTHER; note = 2'-O-methyladenosine-3'-phosphate
  modified_base 17: mod_base = OTHER; note = 2'-O-methyluridine-3'-phosphate
  modified_base 18: mod_base = OTHER; note = 2'-O-methyladenosine-3'-phosphate
  modified_base 19: mod_base = OTHER; note = 2'-O-methyladenosine-3'-phosphate
  modified_base 20: mod_base = OTHER; note = 2'-O-methyluridine-3'-phosphate
  modified_base 21: mod_base = OTHER; note = 2'-O-methyladenosine-3'-phosphate ((2S,4R)-1-[29-[[2-(acetylamino)-2-deoxy-beta-D-galactopyra nosyl]oxy]-14,14-bis[[3-[[3-[[5-[[2-(acetylamino)-2-deoxy-b eta-D-galactopyranosyl]oxy]-1-oxopentyl]amino]propyl]amino] -3-oxopropoxy]methyl]-1,12,19,25-tetraoxo-16-oxa-13,20,24-t riazanonacos-1-yl]-4-hydroxy-2-pyrrolidinyl)methyl ester
ttcatcagtttggagataata

SEQ ID NO: 216 - RNA, 21 nt, synthetic construct
  source 1..21: mol_type = other RNA
  modified_base 1: mod_base = OTHER; note = 2'-O-methylcytidine-3'-phosphorothioate
  modified_base 2: mod_base = OTHER; note = 2'-O-methyluridine-3'-phosphorothioate
  modified_base 3: mod_base = OTHER; note = 2'-O-methylcytidine-3'-phosphate
  modified_base 4: mod_base = OTHER; note = 2'-O-methyladenosine-3'-phosphate
  modified_base 5: mod_base = OTHER; note = 2'-O-methylcytidine-3'-phosphate
  modified_base 6: mod_base = OTHER; note = 2'-O-methyluridine-3'-phosphate
  modified_base 7: mod_base = OTHER; note = 2'-deoxy-2'-fluorouridine-3'-phosphate
  modified_base 8: mod_base = OTHER; note = 2'-O-methyluridine-3'-phosphate
  modified_base 9: mod_base = OTHER; note = 2'-deoxy-2'-fluoroadenosine-3'-phosphate
  modified_base 10: mod_base = OTHER; note = 2'-deoxy-2'-fluoroadenosine-3'-phosphate
  modified_base 11: mod_base = OTHER; note = 2'-deoxy-2'-fluorouridine-3'-phosphate
  modified_base 12: mod_base = OTHER; note = 2'-O-methylcytidine-3'-phosphate
  modified_base 13: mod_base = OTHER; note = 2'-O-methylcytidine-3'-phosphate
  modified_base 14: mod_base = OTHER; note = 2'-O-methyluridine-3'-phosphate
  modified_base 15: mod_base = OTHER; note = 2'-O-methylcytidine-3'-phosphate
  modified_base 16: mod_base = OTHER; note = 2'-O-methyluridine-3'-phosphate
  modified_base 17: mod_base = OTHER; note = 2'-O-methyladenosine-3'-phosphate
  modified_base 18: mod_base = OTHER; note = 2'-O-methyluridine-3'-phosphate
  modified_base 19: mod_base = OTHER; note = 2'-O-methylcytidine-3'-phosphate
  modified_base 20: mod_base = OTHER; note = 2'-O-methylcytidine-3'-phosphate
  modified_base 21: mod_base = OTHER; note = 2'-O-methyladenosine-3'-phosphate ((2S,4R)-1-[29-[[2-(acetylamino)-2-deoxy-beta-D-galactopyra nosyl]oxy]-14,14-bis[[3-[[3-[[5-[[2-(acetylamino)-2-deoxy-b eta-D-galactopyranosyl]oxy]-1-oxopentyl]amino]propyl]amino] -3-oxopropoxy]methyl]-1,12,19,25-tetraoxo-16-oxa-13,20,24-t riazanonacos-1-yl]-4-hydroxy-2-pyrrolidinyl)methyl ester
ctcactttaatcctctatcca

SEQ ID NO: 217 - RNA, 21 nt, synthetic construct
  source 1..21: mol_type = other RNA
  modified_base 1: mod_base = OTHER; note = 2'-O-methyluridine-3'-phosphorothioate
  modified_base 2: mod_base = OTHER; note = 2'-O-methyluridine-3'-phosphorothioate
  modified_base 3: mod_base = OTHER; note = 2'-O-methylcytidine-3'-phosphate
  modified_base 4: mod_base = OTHER; note = 2'-O-methylguanosine-3'-phosphate
  modified_base 5: mod_base = OTHER; note = 2'-O-methyladenosine-3'-phosphate
  modified_base 6: mod_base = OTHER; note = 2'-O-methyladenosine-3'-phosphate
  modified_base 7: mod_base = OTHER; note = 2'-deoxy-2'-fluoroguanosine-3'-phosphate
  modified_base 8: mod_base = OTHER; note = 2'-O-methyladenosine-3'-phosphate
  modified_base 9: mod_base = OTHER; note = 2'-deoxy-2'-fluorouridine-3'-phosphate
  modified_base 10: mod_base = OTHER; note = 2'-deoxy-2'-fluorouridine-3'-phosphate
  modified_base 11: mod_base = OTHER; note = 2'-deoxy-2'-fluorocytidine-3'-phosphate
  modified_base 12: mod_base = OTHER; note = 2'-O-methyluridine-3'-phosphate
  modified_base 13: mod_base = OTHER; note = 2'-O-methylguanosine-3'-phosphate
  modified_base 14: mod_base = OTHER; note = 2'-O-methyluridine-3'-phosphate
  modified_base 15: mod_base = OTHER; note = 2'-O-methylguanosine-3'-phosphate
  modified_base 16: mod_base = OTHER; note = 2'-O-methyladenosine-3'-phosphate
  modified_base 17: mod_base = OTHER; note = 2'-O-methyluridine-3'-phosphate
  modified_base 18: mod_base = OTHER; note = 2'-O-methylcytidine-3'-phosphate
  modified_base 19: mod_base = OTHER; note = 2'-O-methyluridine-3'-phosphate
  modified_base 20: mod_base = OTHER; note = 2'-O-methylcytidine-3'-phosphate
  modified_base 21: mod_base = OTHER; note = 2'-O-methyluridine-3'-phosphate ((2S,4R)-1-[29-[[2-(acetylamino)-2-deoxy-beta-D-galactopyra nosyl]oxy]-14,14-bis[[3-[[3-[[5-[[2-(acetylamino)-2-deoxy-b eta-D-galactopyranosyl]oxy]-1-oxopentyl]amino]propyl]amino] -3-oxopropoxy]methyl]-1,12,19,25-tetraoxo-16-oxa-13,20,24-t riazanonacos-1-yl]-4-hydroxy-2-pyrrolidinyl)methyl ester
ttcgaagattctgtgatctct

SEQ ID NO: 218 - RNA, 21 nt, synthetic construct
  source 1..21: mol_type = other RNA
  modified_base 1: mod_base = OTHER; note = 2'-O-methyladenosine-3'-phosphorothioate
  modified_base 2: mod_base = OTHER; note = 2'-O-methyladenosine-3'-phosphorothioate
  modified_base 3: mod_base = OTHER; note = 2'-O-methylguanosine-3'-phosphate
  modified_base 4: mod_base = OTHER; note = 2'-O-methylcytidine-3'-phosphate
  modified_base 5: mod_base = OTHER; note = 2'-O-methyladenosine-3'-phosphate
  modified_base 6: mod_base = OTHER; note = 2'-O-methylguanosine-3'-phosphate
  modified_base 7: mod_base = OTHER; note = 2'-deoxy-2'-fluoroadenosine-3'-phosphate
  modified_base 8: mod_base = OTHER; note = 2'-O-methyluridine-3'-phosphate
  modified_base 9: mod_base = OTHER; note = 2'-deoxy-2'-fluoroguanosine-3'-phosphate
  modified_base 10: mod_base = OTHER; note = 2'-deoxy-2'-fluoroadenosine-3'-phosphate
  modified_base 11: mod_base = OTHER; note = 2'-deoxy-2'-fluorocytidine-3'-phosphate
  modified_base 12: mod_base = OTHER; note = 2'-O-methyluridine-3'-phosphate
  modified_base 13: mod_base = OTHER; note = 2'-O-methyluridine-3'-phosphate
  modified_base 14: mod_base = OTHER; note = 2'-O-methylguanosine-3'-phosphate
  modified_base 15: mod_base = OTHER; note = 2'-O-methylguanosine-3'-phosphate
  modified_base 16: mod_base = OTHER; note = 2'-O-methylguanosine-3'-phosphate
  modified_base 17: mod_base = OTHER; note = 2'-O-methylcytidine-3'-phosphate
  modified_base 18: mod_base = OTHER; note = 2'-O-methyladenosine-3'-phosphate
  modified_base 19: mod_base = OTHER; note = 2'-O-methyladenosine-3'-phosphate
  modified_base 20: mod_base = OTHER; note = 2'-O-methyladenosine-3'-phosphate
  modified_base 21: mod_base = OTHER; note = 2'-O-methyluridine-3'-phosphate ((2S,4R)-1-[29-[[2-(acetylamino)-2-deoxy-beta-D-galactopyra nosyl]oxy]-14,14-bis[[3-[[3-[[5-[[2-(acetylamino)-2-deoxy-b eta-D-galactopyranosyl]oxy]-1-oxopentyl]amino]propyl]amino] -3-oxopropoxy]methyl]-1,12,19,25-tetraoxo-16-oxa-13,20,24-t riazanonacos-1-yl]-4-hydroxy-2-pyrrolidinyl)methyl ester
aagcagatgacttgggcaaat

SEQ ID NO: 219 - RNA, 21 nt, synthetic construct
  source 1..21: mol_type = other RNA
  modified_base 1: mod_base = OTHER; note = 2'-O-methylguanosine-3'-phosphorothioate
  modified_base 2: mod_base = OTHER; note = 2'-O-methylguanosine-3'-phosphorothioate
  modified_base 3: mod_base = OTHER; note = 2'-O-methyluridine-3'-phosphate
  modified_base 4: mod_base = OTHER; note = 2'-O-methylcytidine-3'-phosphate
  modified_base 5: mod_base = OTHER; note = 2'-O-methylcytidine-3'-phosphate
  modified_base 6: mod_base = OTHER; note = 2'-O-methyluridine-3'-phosphate
  modified_base 7: mod_base = OTHER; note = 2'-deoxy-2'-fluorocytidine-3'-phosphate
  modified_base 8: mod_base = OTHER; note = 2'-O-methyladenosine-3'-phosphate
  modified_base 9: mod_base = OTHER; note = 2'-deoxy-2'-fluorocytidine-3'-phosphate
  modified_base 10: mod_base = OTHER; note = 2'-deoxy-2'-fluorouridine-3'-phosphate
  modified_base 11: mod_base = OTHER; note = 2'-deoxy-2'-fluorouridine-3'-phosphate
  modified_base 12: mod_base = OTHER; note = 2'-O-methyluridine-3'-phosphate
  modified_base 13: mod_base = OTHER; note = 2'-O-methyladenosine-3'-phosphate
  modified_base 14: mod_base = OTHER; note = 2'-O-methyladenosine-3'-phosphate
  modified_base 15: mod_base = OTHER; note = 2'-O-methyluridine-3'-phosphate
  modified_base 16: mod_base = OTHER; note = 2'-O-methylcytidine-3'-phosphate
  modified_base 17: mod_base = OTHER; note = 2'-O-methylcytidine-3'-phosphate
  modified_base 18: mod_base = OTHER; note = 2'-O-methyluridine-3'-phosphate
  modified_base 19: mod_base = OTHER; note = 2'-O-methylcytidine-3'-phosphate
  modified_base 20: mod_base = OTHER; note = 2'-O-methyluridine-3'-phosphate
  modified_base 21: mod_base = OTHER; note = 2'-O-methyladenosine-3'-phosphate ((2S,4R)-1-[29-[[2-(acetylamino)-2-deoxy-beta-D-galactopyra nosyl]oxy]-14,14-bis[[3-[[3-[[5-[[2-(acetylamino)-2-deoxy-b eta-D-galactopyranosyl]oxy]-1-oxopentyl]amino]propyl]amino] -3-oxopropoxy]methyl]-1,12,19,25-tetraoxo-16-oxa-13,20,24-t riazanonacos-1-yl]-4-hydroxy-2-pyrrolidinyl)methyl ester
ggtcctcactttaatcctcta

SEQ ID NO: 220 - RNA, 21 nt, synthetic construct
  source 1..21: mol_type = other RNA
  modified_base 1: mod_base = OTHER; note = 2'-O-methylcytidine-3'-phosphorothioate
  modified_base 2: mod_base = OTHER; note = 2'-O-methyladenosine-3'-phosphorothioate
  modified_base 3: mod_base = OTHER; note = 2'-O-methylguanosine-3'-phosphate
  modified_base 4: mod_base = OTHER; note = 2'-O-methyluridine-3'-phosphate
  modified_base 5: mod_base = OTHER; note = 2'-O-methylguanosine-3'-phosphate
  modified_base 6: mod_base = OTHER; note = 2'-O-methylcytidine-3'-phosphate
  modified_base 7: mod_base = OTHER; note = 2'-deoxy-2'-fluoroadenosine-3'-phosphate
  modified_base 8: mod_base = OTHER; note = 2'-O-methylguanosine-3'-phosphate
  modified_base 9: mod_base = OTHER; note = 2'-deoxy-2'-fluoroguanosine-3'-phosphate
  modified_base 10: mod_base = OTHER; note = 2'-deoxy-2'-fluorouridine-3'-phosphate
  modified_base 11: mod_base = OTHER; note = 2'-deoxy-2'-fluorocytidine-3'-phosphate
  modified_base 12: mod_base = OTHER; note = 2'-O-methylcytidine-3'-phosphate
  modified_base 13: mod_base = OTHER; note = 2'-O-methyluridine-3'-phosphate
  modified_base 14: mod_base = OTHER; note = 2'-O-methylcytidine-3'-phosphate
  modified_base 15: mod_base = OTHER; note = 2'-O-methyladenosine-3'-phosphate
  modified_base 16: mod_base = OTHER; note = 2'-O-methylcytidine-3'-phosphate
  modified_base 17: mod_base = OTHER; note = 2'-O-methyluridine-3'-phosphate
  modified_base 18: mod_base = OTHER; note = 2'-O-methyluridine-3'-phosphate
  modified_base 19: mod_base = OTHER; note = 2'-O-methyluridine-3'-phosphate
  modified_base 20: mod_base = OTHER; note = 2'-O-methyladenosine-3'-phosphate
  modified_base 21: mod_base = OTHER; note = 2'-O-methyladenosine-3'-phosphate ((2S,4R)-1-[29-[[2-(acetylamino)-2-deoxy-beta-D-galactopyra nosyl]oxy]-14,14-bis[[3-[[3-[[5-[[2-(acetylamino)-2-deoxy-b eta-D-galactopyranosyl]oxy]-1-oxopentyl]amino]propyl]amino] -3-oxopropoxy]methyl]-1,12,19,25-tetraoxo-16-oxa-13,20,24-t riazanonacos-1-yl]-4-hydroxy-2-pyrrolidinyl)methyl ester
cagtgcaggtcctcactttaa

SEQ ID NO: 221 - RNA, 21 nt, synthetic construct
  source 1..21: mol_type = other RNA
  modified_base 1: mod_base = OTHER; note = 2'-O-methylcytidine-3'-phosphorothioate
  modified_base 2: mod_base = OTHER; note = 2'-O-methyladenosine-3'-phosphorothioate
  modified_base 3: mod_base = OTHER; note = 2'-O-methyluridine-3'-phosphate
  modified_base 4: mod_base = OTHER; note = 2'-O-methyluridine-3'-phosphate
  modified_base 5: mod_base = OTHER; note = 2'-O-methyladenosine-3'-phosphate
  modified_base 6: mod_base = OTHER; note = 2'-O-methylcytidine-3'-phosphate
  modified_base 7: mod_base = OTHER; note = 2'-deoxy-2'-fluoroadenosine-3'-phosphate
  modified_base 8: mod_base = OTHER; note = 2'-O-methylguanosine-3'-phosphate
  modified_base 9: mod_base = OTHER; note = 2'-deoxy-2'-fluoroguanosine-3'-phosphate
  modified_base 10: mod_base = OTHER; note = 2'-deoxy-2'-fluoroadenosine-3'-phosphate
  modified_base 11: mod_base = OTHER; note = 2'-deoxy-2'-fluorouridine-3'-phosphate
  modified_base 12: mod_base = OTHER; note = 2'-O-methyluridine-3'-phosphate
  modified_base 13: mod_base = OTHER; note = 2'-O-methylguanosine-3'-phosphate
  modified_base 14: mod_base = OTHER; note = 2'-O-methyladenosine-3'-phosphate
  modified_base 15: mod_base = OTHER; note = 2'-O-methylcytidine-3'-phosphate
  modified_base 16: mod_base = OTHER; note = 2'-O-methyluridine-3'-phosphate
  modified_base 17: mod_base = OTHER; note = 2'-O-methylguanosine-3'-phosphate
  modified_base 18: mod_base = OTHER; note = 2'-O-methyladenosine-3'-phosphate
  modified_base 19: mod_base = OTHER; note = 2'-O-methyladenosine-3'-phosphate
  modified_base 20: mod_base = OTHER; note = 2'-O-methylguanosine-3'-phosphate
  modified_base 21: mod_base = OTHER; note = 2'-O-methyluridine-3'-phosphate ((2S,4R)-1-[29-[[2-(acetylamino)-2-deoxy-beta-D-galactopyra nosyl]oxy]-14,14-bis[[3-[[3-[[5-[[2-(acetylamino)-2-deoxy-b eta-D-galactopyranosyl]oxy]-1-oxopentyl]amino]propyl]amino] -3-oxopropoxy]methyl]-1,12,19,25-tetraoxo-16-oxa-13,20,24-t riazanonacos-1-yl]-4-hydroxy-2-pyrrolidinyl)methyl ester
cattacaggattgactgaagt

SEQ ID NO: 222 - RNA, 21 nt, synthetic construct
  source 1..21: mol_type = other RNA
  modified_base 1: mod_base = OTHER; note = 2'-O-methyladenosine-3'-phosphorothioate
  modified_base 2: mod_base = OTHER; note = 2'-O-methyladenosine-3'-phosphorothioate
  modified_base 3: mod_base = OTHER; note = 2'-O-methyladenosine-3'-phosphate
  modified_base 4: mod_base = OTHER; note = 2'-O-methylguanosine-3'-phosphate
  modified_base 5: mod_base = OTHER; note = 2'-O-methyluridine-3'-phosphate
  modified_base 6: mod_base = OTHER; note = 2'-O-methyladenosine-3'-phosphate
  modified_base 7: mod_base = OTHER; note = 2'-deoxy-2'-fluoroadenosine-3'-phosphate
  modified_base 8: mod_base = OTHER; note = 2'-O-methyladenosine-3'-phosphate
  modified_base 9: mod_base = OTHER; note = 2'-deoxy-2'-fluoroadenosine-3'-phosphate
  modified_base 10: mod_base = OTHER; note = 2'-deoxy-2'-fluoroadenosine-3'-phosphate
  modified_base 11: mod_base = OTHER; note = 2'-deoxy-2'-fluoroguanosine-3'-phosphate
  modified_base 12: mod_base = OTHER; note = 2'-O-methyladenosine-3'-phosphate
  modified_base 13: mod_base = OTHER; note = 2'-O-methylcytidine-3'-phosphate
  modified_base 14: mod_base = OTHER; note = 2'-O-methyladenosine-3'-phosphate
  modified_base 15: mod_base = OTHER; note = 2'-O-methylguanosine-3'-phosphate
  modified_base 16: mod_base = OTHER; note = 2'-O-methylguanosine-3'-phosphate
  modified_base 17: mod_base = OTHER; note = 2'-O-methyladenosine-3'-phosphate
  modified_base 18: mod_base = OTHER; note = 2'-O-methyladenosine-3'-phosphate
  modified_base 19: mod_base = OTHER; note = 2'-O-methyladenosine-3'-phosphate
  modified_base 20: mod_base = OTHER; note = 2'-O-methylcytidine-3'-phosphate
  modified_base 21: mod_base = OTHER; note = 2'-O-methyluridine-3'-phosphate ((2S,4R)-1-[29-[[2-(acetylamino)-2-deoxy-beta-D-galactopyra nosyl]oxy]-14,14-bis[[3-[[3-[[5-[[2-(acetylamino)-2-deoxy-b eta-D-galactopyranosyl]oxy]-1-oxopentyl]amino]propyl]amino] -3-oxopropoxy]methyl]-1,12,19,25-tetraoxo-16-oxa-13,20,24-t riazanonacos-1-yl]-4-hydroxy-2-pyrrolidinyl)methyl ester
aaagtaaaaagacaggaaact

SEQ ID NO: 223 - RNA, 21 nt, synthetic construct
  source 1..21: mol_type = other RNA
  modified_base 1: mod_base = OTHER; note = 2'-O-methyladenosine-3'-phosphorothioate
  modified_base 2: mod_base = OTHER; note = 2'-O-methylguanosine-3'-phosphorothioate
  modified_base 3: mod_base = OTHER; note = 2'-O-methyluridine-3'-phosphate
  modified_base 4: mod_base = OTHER; note = 2'-O-methyluridine-3'-phosphate
  modified_base 5: mod_base = OTHER; note = 2'-O-methyluridine-3'-phosphate
  modified_base 6: mod_base = OTHER; note = 2'-O-methylguanosine-3'-phosphate
  modified_base 7: mod_base = OTHER; note = 2'-deoxy-2'-fluoroguanosine-3'-phosphate
  modified_base 8: mod_base = OTHER; note = 2'-O-methyladenosine-3'-phosphate
  modified_base 9: mod_base = OTHER; note = 2'-deoxy-2'-fluoroguanosine-3'-phosphate
  modified_base 10: mod_base = OTHER; note = 2'-deoxy-2'-fluoroadenosine-3'-phosphate
  modified_base 11: mod_base = OTHER; note = 2'-deoxy-2'-fluorouridine-3'-phosphate
  modified_base 12: mod_base = OTHER; note = 2'-O-methyladenosine-3'-phosphate
  modified_base 13: mod_base = OTHER; note = 2'-O-methyladenosine-3'-phosphate
  modified_base 14: mod_base = OTHER; note = 2'-O-methyluridine-3'-phosphate
  modified_base 15: mod_base = OTHER; note = 2'-O-methyladenosine-3'-phosphate
  modified_base 16: mod_base = OTHER; note = 2'-O-methylcytidine-3'-phosphate
  modified_base 17: mod_base = OTHER; note = 2'-O-methyladenosine-3'-phosphate
  modified_base 18: mod_base = OTHER; note = 2'-O-methylcytidine-3'-phosphate
  modified_base 19: mod_base = OTHER; note = 2'-O-methyladenosine-3'-phosphate
  modified_base 20: mod_base = OTHER; note = 2'-O-methyladenosine-3'-phosphate
  modified_base 21: mod_base = OTHER; note = 2'-O-methyluridine-3'-phosphate ((2S,4R)-1-[29-[[2-(acetylamino)-2-deoxy-beta-D-galactopyra nosyl]oxy]-14,14-bis[[3-[[3-[[5-[[2-(acetylamino)-2-deoxy-b eta-D-galactopyranosyl]oxy]-1-oxopentyl]amino]propyl]amino] -3-oxopropoxy]methyl]-1,12,19,25-tetraoxo-16-oxa-13,20,24-t riazanonacos-1-yl]-4-hydroxy-2-pyrrolidinyl)methyl ester
agtttggagataatacacaat

SEQ ID NO: 224 - RNA, 21 nt, synthetic construct
  source 1..21: mol_type = other RNA
  modified_base 1: mod_base = OTHER; note = 2'-O-methylcytidine-3'-phosphorothioate
  modified_base 2: mod_base = OTHER; note = 2'-O-methylguanosine-3'-phosphorothioate
  modified_base 3: mod_base = OTHER; note = 2'-O-methyladenosine-3'-phosphate
  modified_base 4: mod_base = OTHER; note = 2'-O-methyladenosine-3'-phosphate
  modified_base 5: mod_base = OTHER; note = 2'-O-methylguanosine-3'-phosphate
  modified_base 6: mod_base = OTHER; note = 2'-O-methyladenosine-3'-phosphate
  modified_base 7: mod_base = OTHER; note = 2'-deoxy-2'-fluorouridine-3'-phosphate
  modified_base 8: mod_base = OTHER; note = 2'-O-methyluridine-3'-phosphate
  modified_base 9: mod_base = OTHER; note = 2'-deoxy-2'-fluorocytidine-3'-phosphate
  modified_base 10: mod_base = OTHER; note = 2'-deoxy-2'-fluorouridine-3'-phosphate
  modified_base 11: mod_base = OTHER; note = 2'-deoxy-2'-fluoroguanosine-3'-phosphate
  modified_base 12: mod_base = OTHER; note = 2'-O-methyluridine-3'-phosphate
  modified_base 13: mod_base = OTHER; note = 2'-O-methylguanosine-3'-phosphate
  modified_base 14: mod_base = OTHER; note = 2'-O-methyladenosine-3'-phosphate
  modified_base 15: mod_base = OTHER; note = 2'-O-methyluridine-3'-phosphate
  modified_base 16: mod_base = OTHER; note = 2'-O-methylcytidine-3'-phosphate
  modified_base 17: mod_base = OTHER; note = 2'-O-methyluridine-3'-phosphate
  modified_base 18: mod_base = OTHER; note = 2'-O-methylcytidine-3'-phosphate
  modified_base 19: mod_base = OTHER; note = 2'-O-methylguanosine-3'-phosphate
  modified_base 20: mod_base = OTHER; note = 2'-O-methylcytidine-3'-phosphate
  modified_base 21: mod_base = OTHER; note = 2'-O-methyluridine-3'-phosphate ((2S,4R)-1-[29-[[2-(acetylamino)-2-deoxy-beta-D-galactopyra nosyl]oxy]-14,14-bis[[3-[[3-[[5-[[2-(acetylamino)-2-deoxy-b eta-D-galactopyranosyl]oxy]-1-oxopentyl]amino]propyl]amino] -3-oxopropoxy]methyl]-1,12,19,25-tetraoxo-16-oxa-13,20,24-t riazanonacos-1-yl]-4-hydroxy-2-pyrrolidinyl)methyl ester
cgaagattctgtgatctcgct

SEQ ID NO: 225 - RNA, 21 nt, synthetic construct
  source 1..21: mol_type = other RNA
  modified_base 1: mod_base = OTHER; note = 2'-O-methylguanosine-3'-phosphorothioate
  modified_base 2: mod_base = OTHER; note = 2'-O-methylcytidine-3'-phosphorothioate
  modified_base 3: mod_base = OTHER; note = 2'-O-methyladenosine-3'-phosphate
  modified_base 4: mod_base = OTHER; note = 2'-O-methyluridine-3'-phosphate
  modified_base 5: mod_base = OTHER; note = 2'-O-methyluridine-3'-phosphate
  modified_base 6: mod_base = OTHER; note = 2'-O-methyladenosine-3'-phosphate
  modified_base 7: mod_base = OTHER; note = 2'-deoxy-2'-fluorocytidine-3'-phosphate
  modified_base 8: mod_base = OTHER; note = 2'-O-methyladenosine-3'-phosphate
  modified_base 9: mod_base = OTHER; note = 2'-deoxy-2'-fluoroguanosine-3'-phosphate
  modified_base 10: mod_base = OTHER; note = 2'-deoxy-2'-fluoroguanosine-3'-phosphate
  modified_base 11: mod_base = OTHER; note = 2'-deoxy-2'-fluoroadenosine-3'-phosphate
  modified_base 12: mod_base = OTHER; note = 2'-O-methyluridine-3'-phosphate
  modified_base 13: mod_base = OTHER; note = 2'-O-methyluridine-3'-phosphate
  modified_base 14: mod_base = OTHER; note = 2'-O-methylguanosine-3'-phosphate
  modified_base 15: mod_base = OTHER; note = 2'-O-methyladenosine-3'-phosphate
  modified_base 16: mod_base = OTHER; note = 2'-O-methylcytidine-3'-phosphate
  modified_base 17: mod_base = OTHER; note = 2'-O-methyluridine-3'-phosphate
  modified_base 18: mod_base = OTHER; note = 2'-O-methylguanosine-3'-phosphate
  modified_base 19: mod_base = OTHER; note = 2'-O-methyladenosine-3'-phosphate
  modified_base 20: mod_base = OTHER; note = 2'-O-methyladenosine-3'-phosphate
  modified_base 21: mod_base = OTHER; note = 2'-O-methyluridine-3'-phosphate ((2S,4R)-1-[29-[[2-(acetylamino)-2-deoxy-beta-D-galactopyra nosyl]oxy]-14,14-bis[[3-[[3-[[5-[[2-(acetylamino)-2-deoxy-b eta-D-galactopyranosyl]oxy]-1-oxopentyl]amino]propyl]amino] -3-oxopropoxy]methyl]-1,12,19,25-tetraoxo-16-oxa-13,20,24-t riazanonacos-1-yl]-4-hydroxy-2-pyrrolidinyl)methyl ester
gcattacaggattgactgaat

SEQ ID NO: 226 - RNA, 21 nt, synthetic construct
  source 1..21: mol_type = other RNA
  modified_base 1: mod_base = OTHER; note = 2'-O-methyluridine-3'-phosphorothioate
  modified_base 2: mod_base = OTHER; note = 2'-O-methylcytidine-3'-phosphorothioate
  modified_base 3: mod_base = OTHER; note = 2'-O-methyladenosine-3'-phosphate
  modified_base 4: mod_base = OTHER; note = 2'-O-methyluridine-3'-phosphate
  modified_base 5: mod_base = OTHER; note = 2'-O-methylcytidine-3'-phosphate
  modified_base 6: mod_base = OTHER; note = 2'-O-methyladenosine-3'-phosphate
  modified_base 7: mod_base = OTHER; note = 2'-deoxy-2'-fluoroguanosine-3'-phosphate
  modified_base 8: mod_base = OTHER; note = 2'-O-methyluridine-3'-phosphate
  modified_base 9: mod_base = OTHER; note = 2'-deoxy-2'-fluorouridine-3'-phosphate
  modified_base 10: mod_base = OTHER; note = 2'-deoxy-2'-fluorouridine-3'-phosphate
  modified_base 11: mod_base = OTHER; note = 2'-deoxy-2'-fluoroguanosine-3'-phosphate
  modified_base 12: mod_base = OTHER; note = 2'-O-methylguanosine-3'-phosphate
  modified_base 13: mod_base = OTHER; note = 2'-O-methyladenosine-3'-phosphate
  modified_base 14: mod_base = OTHER; note = 2'-O-methylguanosine-3'-phosphate
  modified_base 15: mod_base = OTHER; note = 2'-O-methyladenosine-3'-phosphate
  modified_base 16: mod_base = OTHER; note = 2'-O-methyluridine-3'-phosphate
  modified_base 17: mod_base = OTHER; note = 2'-O-methyladenosine-3'-phosphate
  modified_base 18: mod_base = OTHER; note = 2'-O-methyladenosine-3'-phosphate
  modified_base 19: mod_base = OTHER; note = 2'-O-methyluridine-3'-phosphate
  modified_base 20: mod_base = OTHER; note = 2'-O-methyladenosine-3'-phosphate
  modified_base 21: mod_base = OTHER; note = 2'-O-methyluridine-3'-phosphate ((2S,4R)-1-[29-[[2-(acetylamino)-2-deoxy-beta-D-galactopyra nosyl]oxy]-14,14-bis[[3-[[3-[[5-[[2-(acetylamino)-2-deoxy-b eta-D-galactopyranosyl]oxy]-1-oxopentyl]amino]propyl]amino] -3-oxopropoxy]methyl]-1,12,19,25-tetraoxo-16-oxa-13,20,24-t riazanonacos-1-yl]-4-hydroxy-2-pyrrolidinyl)methyl ester
tcatcagtttggagataatat

SEQ ID NO: 227 - RNA, 21 nt, synthetic construct
  source 1..21: mol_type = other RNA
  modified_base 1: mod_base = OTHER; note = 2'-O-methyladenosine-3'-phosphorothioate
  modified_base 2: mod_base = OTHER; note = 2'-O-methylcytidine-3'-phosphorothioate
  modified_base 3: mod_base = OTHER; note = 2'-O-methyluridine-3'-phosphate
  modified_base 4: mod_base = OTHER; note = 2'-O-methyluridine-3'-phosphate
  modified_base 5: mod_base = OTHER; note = 2'-O-methyluridine-3'-phosphate
  modified_base 6: mod_base = OTHER; note = 2'-O-methyladenosine-3'-phosphate
  modified_base 7: mod_base = OTHER; note = 2'-deoxy-2'-fluoroadenosine-3'-phosphate
  modified_base 8: mod_base = OTHER; note = 2'-O-methyluridine-3'-phosphate
  modified_base 9: mod_base = OTHER; note = 2'-deoxy-2'-fluorocytidine-3'-phosphate
  modified_base 10: mod_base = OTHER; note = 2'-deoxy-2'-fluorocytidine-3'-phosphate
  modified_base 11: mod_base = OTHER; note = 2'-deoxy-2'-fluorouridine-3'-phosphate
  modified_base 12: mod_base = OTHER; note = 2'-O-methylcytidine-3'-phosphate
  modified_base 13: mod_base = OTHER; note = 2'-O-methyluridine-3'-phosphate
  modified_base 14: mod_base = OTHER; note = 2'-O-methyladenosine-3'-phosphate
  modified_base 15: mod_base = OTHER; note = 2'-O-methyluridine-3'-phosphate
  modified_base 16: mod_base = OTHER; note = 2'-O-methylcytidine-3'-phosphate
  modified_base 17: mod_base = OTHER; note = 2'-O-methylcytidine-3'-phosphate
  modified_base 18: mod_base = OTHER; note = 2'-O-methyladenosine-3'-phosphate
  modified_base 19: mod_base = OTHER; note = 2'-O-methylguanosine-3'-phosphate
  modified_base 20: mod_base = OTHER; note = 2'-O-methyladenosine-3'-phosphate
  modified_base 21: mod_base = OTHER; note = 2'-O-methyluridine-3'-phosphate ((2S,4R)-1-[29-[[2-(acetylamino)-2-deoxy-beta-D-galactopyra nosyl]oxy]-14,14-bis[[3-[[3-[[5-[[2-(acetylamino)-2-deoxy-b eta-D-galactopyranosyl]oxy]-1-oxopentyl]amino]propyl]amino] -3-oxopropoxy]methyl]-1,12,19,25-tetraoxo-16-oxa-13,20,24-t riazanonacos-1-yl]-4-hydroxy-2-pyrrolidinyl)methyl ester
actttaatcctctatccagat

SEQ ID NO: 228 - RNA, 21 nt, synthetic construct
  source 1..21: mol_type = other RNA
  modified_base 1: mod_base = OTHER; note = 2'-O-methylguanosine-3'-phosphorothioate
  modified_base 2: mod_base = OTHER; note = 2'-O-methyluridine-3'-phosphorothioate
  modified_base 3: mod_base = OTHER; note = 2'-O-methyladenosine-3'-phosphate
  modified_base 4: mod_base = OTHER; note = 2'-O-methyladenosine-3'-phosphate
  modified_base 5: mod_base = OTHER; note = 2'-O-methyladenosine-3'-phosphate
  modified_base 6: mod_base = OTHER; note = 2'-O-methyladenosine-3'-phosphate
  modified_base 7: mod_base = OTHER; note = 2'-deoxy-2'-fluoroadenosine-3'-phosphate
  modified_base 8: mod_base = OTHER; note = 2'-O-methylguanosine-3'-phosphate
  modified_base 9: mod_base = OTHER; note = 2'-deoxy-2'-fluoroadenosine-3'-phosphate
  modified_base 10: mod_base = OTHER; note = 2'-deoxy-2'-fluorocytidine-3'-phosphate
  modified_base 11: mod_base = OTHER; note = 2'-deoxy-2'-fluoroadenosine-3'-phosphate
  modified_base 12: mod_base = OTHER; note = 2'-O-methylguanosine-3'-phosphate
  modified_base 13: mod_base = OTHER; note = 2'-O-methylguanosine-3'-phosphate
  modified_base 14: mod_base = OTHER; note = 2'-O-methyladenosine-3'-phosphate
  modified_base 15: mod_base = OTHER; note = 2'-O-methyladenosine-3'-phosphate
  modified_base 16: mod_base = OTHER; note = 2'-O-methyladenosine-3'-phosphate
  modified_base 17: mod_base = OTHER; note = 2'-O-methylcytidine-3'-phosphate
  modified_base 18: mod_base = OTHER; note = 2'-O-methylguanosine-3'-phosphate
  modified_base 19: mod_base = OTHER; note = 2'-O-methylcytidine-3'-phosphate
  modified_base 20: mod_base = OTHER; note = 2'-O-methyluridine-3'-phosphate
  modified_base 21: mod_base = OTHER; note = 2'-O-methyluridine-3'-phosphate ((2S,4R)-1-[29-[[2-(acetylamino)-2-deoxy-beta-D-galactopyra nosyl]oxy]-14,14-bis[[3-[[3-[[5-[[2-(acetylamino)-2-deoxy-b eta-D-galactopyranosyl]oxy]-1-oxopentyl]amino]propyl]amino] -3-oxopropoxy]methyl]-1,12,19,25-tetraoxo-16-oxa-13,20,24-t riazanonacos-1-yl]-4-hydroxy-2-pyrrolidinyl)methyl ester
gtaaaaagacaggaaacgctt

SEQ ID NO: 229 - RNA, 21 nt, synthetic construct
  source 1..21: mol_type = other RNA
  modified_base 1: mod_base = OTHER; note = 2'-O-methyladenosine-3'-phosphorothioate
  modified_base 2: mod_base = OTHER; note = 2'-O-methyluridine-3'-phosphorothioate
  modified_base 3: mod_base = OTHER; note = 2'-O-methylcytidine-3'-phosphate
  modified_base 4: mod_base = OTHER; note = 2'-O-methyladenosine-3'-phosphate
  modified_base 5: mod_base = OTHER; note = 2'-O-methyladenosine-3'-phosphate
  modified_base 6: mod_base = OTHER; note = 2'-O-methyluridine-3'-phosphate
  modified_base 7: mod_base = OTHER; note = 2'-deoxy-2'-fluorouridine-3'-phosphate
  modified_base 8: mod_base = OTHER; note = 2'-O-methyluridine-3'-phosphate
  modified_base 9: mod_base = OTHER; note = 2'-deoxy-2'-fluorocytidine-3'-phosphate
  modified_base 10: mod_base = OTHER; note = 2'-deoxy-2'-fluoroguanosine-3'-phosphate
  modified_base 11: mod_base = OTHER; note = 2'-deoxy-2'-fluoroadenosine-3'-phosphate
  modified_base 12: mod_base = OTHER; note = 2'-O-methylguanosine-3'-phosphate
  modified_base 13: mod_base = OTHER; note = 2'-O-methylcytidine-3'-phosphate
  modified_base 14: mod_base = OTHER; note = 2'-O-methyladenosine-3'-phosphate
  modified_base 15: mod_base = OTHER; note = 2'-O-methylguanosine-3'-phosphate
  modified_base 16: mod_base = OTHER; note = 2'-O-methyladenosine-3'-phosphate
  modified_base 17: mod_base = OTHER; note = 2'-O-methyladenosine-3'-phosphate
  modified_base 18: mod_base = OTHER; note = 2'-O-methylguanosine-3'-phosphate
  modified_base 19: mod_base = OTHER; note = 2'-O-methylguanosine-3'-phosphate
  modified_base 20: mod_base = OTHER; note = 2'-O-methyladenosine-3'-phosphate
  modified_base 21: mod_base = OTHER; note = 2'-O-methyladenosine-3'-phosphate ((2S,4R)-1-[29-[[2-(acetylamino)-2-deoxy-beta-D-galactopyra nosyl]oxy]-14,14-bis[[3-[[3-[[5-[[2-(acetylamino)-2-deoxy-b eta-D-galactopyranosyl]oxy]-1-oxopentyl]amino]propyl]amino] -3-oxopropoxy]methyl]-1,12,19,25-tetraoxo-16-oxa-13,20,24-t riazanonacos-1-yl]-4-hydroxy-2-pyrrolidinyl)methyl ester
atcaatttcgagcagaaggaa

SEQ ID NO: 230 - RNA, 21 nt, synthetic construct
  source 1..21: mol_type = other RNA
  modified_base 1: mod_base = OTHER; note = 2'-O-methyluridine-3'-phosphorothioate
  modified_base 2: mod_base = OTHER; note = 2'-O-methylcytidine-3'-phosphorothioate
  modified_base 3: mod_base = OTHER; note = 2'-O-methylcytidine-3'-phosphate
  modified_base 4: mod_base = OTHER; note = 2'-O-methyluridine-3'-phosphate
  modified_base 5: mod_base = OTHER; note = 2'-O-methylcytidine-3'-phosphate
  modified_base 6: mod_base = OTHER; note = 2'-O-methyladenosine-3'-phosphate
  modified_base 7: mod_base = OTHER; note = 2'-deoxy-2'-fluorocytidine-3'-phosphate
  modified_base 8: mod_base = OTHER; note = 2'-O-methyluridine-3'-phosphate
  modified_base 9: mod_base = OTHER; note = 2'-deoxy-2'-fluorouridine-3'-phosphate
  modified_base 10: mod_base = OTHER; note = 2'-deoxy-2'-fluorouridine-3'-phosphate
  modified_base 11: mod_base = OTHER; note = 2'-deoxy-2'-fluoroadenosine-3'-phosphate
  modified_base 12: mod_base = OTHER; note = 2'-O-methyladenosine-3'-phosphate
  modified_base 13: mod_base = OTHER; note = 2'-O-methyluridine-3'-phosphate
  modified_base 14: mod_base = OTHER; note = 2'-O-methylcytidine-3'-phosphate
  modified_base 15: mod_base = OTHER; note = 2'-O-methylcytidine-3'-phosphate
  modified_base 16: mod_base = OTHER; note = 2'-O-methyluridine-3'-phosphate
  modified_base 17: mod_base = OTHER; note = 2'-O-methylcytidine-3'-phosphate
  modified_base 18: mod_base = OTHER; note = 2'-O-methyluridine-3'-phosphate
  modified_base 19: mod_base = OTHER; note = 2'-O-methyladenosine-3'-phosphate
  modified_base 20: mod_base = OTHER; note = 2'-O-methyluridine-3'-phosphate
  modified_base 21: mod_base = OTHER; note = 2'-O-methyluridine-3'-phosphate ((2S,4R)-1-[29-[[2-(acetylamino)-2-deoxy-beta-D-galactopyra nosyl]oxy]-14,14-bis[[3-[[3-[[5-[[2-(acetylamino)-2-deoxy-b eta-D-galactopyranosyl]oxy]-1-oxopentyl]amino]propyl]amino] -3-oxopropoxy]methyl]-1,12,19,25-tetraoxo-16-oxa-13,20,24-t riazanonacos-1-yl]-4-hydroxy-2-pyrrolidinyl)methyl ester
tcctcactttaatcctctatt

SEQ ID NO: 231 - RNA, 21 nt, synthetic construct
  source 1..21: mol_type = other RNA
  modified_base 1: mod_base = OTHER; note = 2'-O-methylguanosine-3'-phosphorothioate
  modified_base 2: mod_base = OTHER; note = 2'-O-methyluridine-3'-phosphorothioate
  modified_base 3: mod_base = OTHER; note = 2'-O-methylcytidine-3'-phosphate
  modified_base 4: mod_base = OTHER; note = 2'-O-methylcytidine-3'-phosphate
  modified_base 5: mod_base = OTHER; note = 2'-O-methyluridine-3'-phosphate
  modified_base 6: mod_base = OTHER; note = 2'-O-methylcytidine-3'-phosphate
  modified_base 7: mod_base = OTHER; note = 2'-deoxy-2'-fluoroadenosine-3'-phosphate
  modified_base 8: mod_base = OTHER; note = 2'-O-methylcytidine-3'-phosphate
  modified_base 9: mod_base = OTHER; note = 2'-deoxy-2'-fluorouridine-3'-phosphate
  modified_base 10: mod_base = OTHER; note = 2'-deoxy-2'-fluorouridine-3'-phosphate
  modified_base 11: mod_base = OTHER; note = 2'-deoxy-2'-fluorouridine-3'-phosphate
  modified_base 12: mod_base = OTHER; note = 2'-O-methyladenosine-3'-phosphate
  modified_base 13: mod_base = OTHER; note = 2'-O-methyladenosine-3'-phosphate
  modified_base 14: mod_base = OTHER; note = 2'-O-methyluridine-3'-phosphate
  modified_base 15: mod_base = OTHER; note = 2'-O-methylcytidine-3'-phosphate
  modified_base 16: mod_base = OTHER; note = 2'-O-methylcytidine-3'-phosphate
  modified_base 17: mod_base = OTHER; note = 2'-O-methyluridine-3'-phosphate
  modified_base 18: mod_base = OTHER; note = 2'-O-methylcytidine-3'-phosphate
  modified_base 19: mod_base = OTHER; note = 2'-O-methyluridine-3'-phosphate
  modified_base 20: mod_base = OTHER; note = 2'-O-methyladenosine-3'-phosphate
  modified_base 21: mod_base = OTHER; note = 2'-O-methyluridine-3'-phosphate ((2S,4R)-1-[29-[[2-(acetylamino)-2-deoxy-beta-D-galactopyra nosyl]oxy]-14,14-bis[[3-[[3-[[5-[[2-(acetylamino)-2-deoxy-b eta-D-galactopyranosyl]oxy]-1-oxopentyl]amino]propyl]amino] -3-oxopropoxy]methyl]-1,12,19,25-tetraoxo-16-oxa-13,20,24-t riazanonacos-1-yl]-4-hydroxy-2-pyrrolidinyl)methyl ester
gtcctcactttaatcctctat

SEQ ID NO: 232 - RNA, 21 nt, synthetic construct
  source 1..21: mol_type = other RNA
  modified_base 1: mod_base = OTHER; note = 2'-O-methylcytidine-3'-phosphorothioate
  modified_base 2: mod_base = OTHER; note = 2'-O-methyladenosine-3'-phosphorothioate
  modified_base 3: mod_base = OTHER; note = 2'-O-methyluridine-3'-phosphate
  modified_base 4: mod_base = OTHER; note = 2'-O-methylcytidine-3'-phosphate
  modified_base 5: mod_base = OTHER; note = 2'-O-methyladenosine-3'-phosphate
  modified_base 6: mod_base = OTHER; note = 2'-O-methylguanosine-3'-phosphate
  modified_base 7: mod_base = OTHER; note = 2'-deoxy-2'-fluorouridine-3'-phosphate
  modified_base 8: mod_base = OTHER; note = 2'-O-methyluridine-3'-phosphate
  modified_base 9: mod_base = OTHER; note = 2'-deoxy-2'-fluorouridine-3'-phosphate
  modified_base 10: mod_base = OTHER; note = 2'-deoxy-2'-fluoroguanosine-3'-phosphate
  modified_base 11: mod_base = OTHER; note = 2'-deoxy-2'-fluoroguanosine-3'-phosphate
  modified_base 12: mod_base = OTHER; note = 2'-O-methyladenosine-3'-phosphate
  modified_base 13: mod_base = OTHER; note = 2'-O-methylguanosine-3'-phosphate
  modified_base 14: mod_base = OTHER; note = 2'-O-methyladenosine-3'-phosphate
  modified_base 15: mod_base = OTHER; note = 2'-O-methyluridine-3'-phosphate
  modified_base 16: mod_base = OTHER; note = 2'-O-methyladenosine-3'-phosphate
  modified_base 17: mod_base = OTHER; note = 2'-O-methyladenosine-3'-phosphate
  modified_base 18: mod_base = OTHER; note = 2'-O-methyluridine-3'-phosphate
  modified_base 19: mod_base = OTHER; note = 2'-O-methyladenosine-3'-phosphate
  modified_base 20: mod_base = OTHER; note = 2'-O-methylcytidine-3'-phosphate
  modified_base 21: mod_base = OTHER; note = 2'-O-methyladenosine-3'-phosphate ((2S,4R)-1-[29-[[2-(acetylamino)-2-deoxy-beta-D-galactopyra nosyl]oxy]-14,14-bis[[3-[[3-[[5-[[2-(acetylamino)-2-deoxy-b eta-D-galactopyranosyl]oxy]-1-oxopentyl]amino]propyl]amino] -3-oxopropoxy]methyl]-1,12,19,25-tetraoxo-16-oxa-13,20,24-t riazanonacos-1-yl]-4-hydroxy-2-pyrrolidinyl)methyl ester
catcagtttggagataataca

SEQ ID NO: 233 - RNA, 21 nt, synthetic construct
  source 1..21: mol_type = other RNA
  modified_base 1: mod_base = OTHER; note = 2'-O-methyladenosine-3'-phosphorothioate
  modified_base 2: mod_base = OTHER; note = 2'-O-methyladenosine-3'-phosphorothioate
  modified_base 3: mod_base = OTHER; note = 2'-O-methylguanosine-3'-phosphate
  modified_base 4: mod_base = OTHER; note = 2'-O-methyluridine-3'-phosphate
  modified_base 5: mod_base = OTHER; note = 2'-O-methyladenosine-3'-phosphate
  modified_base 6: mod_base = OTHER; note = 2'-O-methyladenosine-3'-phosphate
  modified_base 7: mod_base = OTHER; note = 2'-deoxy-2'-fluoroadenosine-3'-phosphate
  modified_base 8: mod_base = OTHER; note = 2'-O-methyladenosine-3'-phosphate
  modified_base 9: mod_base = OTHER; note = 2'-deoxy-2'-fluoroadenosine-3'-phosphate
  modified_base 10: mod_base = OTHER; note = 2'-deoxy-2'-fluoroguanosine-3'-phosphate
  modified_base 11: mod_base = OTHER; note = 2'-deoxy-2'-fluoroadenosine-3'-phosphate
  modified_base 12: mod_base = OTHER; note = 2'-O-methylcytidine-3'-phosphate
  modified_base 13: mod_base = OTHER; note = 2'-O-methyladenosine-3'-phosphate
  modified_base 14: mod_base = OTHER; note = 2'-O-methylguanosine-3'-phosphate
  modified_base 15: mod_base = OTHER; note = 2'-O-methylguanosine-3'-phosphate
  modified_base 16: mod_base = OTHER; note = 2'-O-methyladenosine-3'-phosphate
  modified_base 17: mod_base = OTHER; note = 2'-O-methyladenosine-3'-phosphate
  modified_base 18: mod_base = OTHER; note = 2'-O-methyladenosine-3'-phosphate
  modified_base 19: mod_base = OTHER; note = 2'-O-methylcytidine-3'-phosphate
  modified_base 20: mod_base = OTHER; note = 2'-O-methylguanosine-3'-phosphate
  modified_base 21: mod_base = OTHER; note = 2'-O-methyluridine-3'-phosphate ((2S,4R)-1-[29-[[2-(acetylamino)-2-deoxy-beta-D-galactopyra nosyl]oxy]-14,14-bis[[3-[[3-[[5-[[2-(acetylamino)-2-deoxy-b eta-D-galactopyranosyl]oxy]-1-oxopentyl]amino]propyl]amino] -3-oxopropoxy]methyl]-1,12,19,25-tetraoxo-16-oxa-13,20,24-t riazanonacos-1-yl]-4-hydroxy-2-pyrrolidinyl)methyl ester
aagtaaaaagacaggaaacgt

SEQ ID NO: 234 - RNA, 21 nt, synthetic construct
  source 1..21: mol_type = other RNA
  modified_base 1: mod_base = OTHER; note = 2'-O-methyladenosine-3'-phosphorothioate
  modified_base 2: mod_base = OTHER; note = 2'-O-methylguanosine-3'-phosphorothioate
  modified_base 3: mod_base = OTHER; note = 2'-O-methylcytidine-3'-phosphate
  modified_base 4: mod_base = OTHER; note = 2'-O-methyladenosine-3'-phosphate
  modified_base 5: mod_base = OTHER; note = 2'-O-methyluridine-3'-phosphate
  modified_base 6: mod_base = OTHER; note = 2'-O-methyluridine-3'-phosphate
  modified_base 7: mod_base = OTHER; note = 2'-deoxy-2'-fluoroadenosine-3'-phosphate
  modified_base 8: mod_base = OTHER; note = 2'-O-methylcytidine-3'-phosphate
  modified_base 9: mod_base = OTHER; note = 2'-deoxy-2'-fluoroadenosine-3'-phosphate
  modified_base 10: mod_base = OTHER; note = 2'-deoxy-2'-fluoroguanosine-3'-phosphate
  modified_base 11: mod_base = OTHER; note = 2'-deoxy-2'-fluoroguanosine-3'-phosphate
  modified_base 12: mod_base = OTHER; note = 2'-O-methyladenosine-3'-phosphate
  modified_base 13: mod_base = OTHER; note = 2'-O-methyluridine-3'-phosphate
  modified_base 14: mod_base = OTHER; note = 2'-O-methyluridine-3'-phosphate
  modified_base 15: mod_base = OTHER; note = 2'-O-methylguanosine-3'-phosphate
  modified_base 16: mod_base = OTHER; note = 2'-O-methyladenosine-3'-phosphate
  modified_base 17: mod_base = OTHER; note = 2'-O-methylcytidine-3'-phosphate
  modified_base 18: mod_base = OTHER; note = 2'-O-methyluridine-3'-phosphate
  modified_base 19: mod_base = OTHER; note = 2'-O-methylguanosine-3'-phosphate
  modified_base 20: mod_base = OTHER; note = 2'-O-methyladenosine-3'-phosphate
  modified_base 21: mod_base = OTHER; note = 2'-O-methyladenosine-3'-phosphate ((2S,4R)-1-[29-[[2-(acetylamino)-2-deoxy-beta-D-galactopyra nosyl]oxy]-14,14-bis[[3-[[3-[[5-[[2-(acetylamino)-2-deoxy-b eta-D-galactopyranosyl]oxy]-1-oxopentyl]amino]propyl]amino] -3-oxopropoxy]methyl]-1,12,19,25-tetraoxo-16-oxa-13,20,24-t riazanonacos-1-yl]-4-hydroxy-2-pyrrolidinyl)methyl ester
agcattacaggattgactgaa

SEQ ID NO: 235 - RNA, 21 nt, synthetic construct
  source 1..21: mol_type = other RNA
  modified_base 1: mod_base = OTHER; note = 2'-O-methyladenosine-3'-phosphorothioate
  modified_base 2: mod_base = OTHER; note = 2'-O-methyluridine-3'-phosphorothioate
  modified_base 3: mod_base = OTHER; note = 2'-O-methyluridine-3'-phosphate
  modified_base 4: mod_base = OTHER; note = 2'-O-methylcytidine-3'-phosphate
  modified_base 5: mod_base = OTHER; note = 2'-O-methyluridine-3'-phosphate
  modified_base 6: mod_base = OTHER; note = 2'-O-methylguanosine-3'-phosphate
  modified_base 7: mod_base = OTHER; note = 2'-deoxy-2'-fluorouridine-3'-phosphate
  modified_base 8: mod_base = OTHER; note = 2'-O-methylguanosine-3'-phosphate
  modified_base 9: mod_base = OTHER; note = 2'-deoxy-2'-fluoroadenosine-3'-phosphate
  modified_base 10: mod_base = OTHER; note = 2'-deoxy-2'-fluorouridine-3'-phosphate
  modified_base 11: mod_base = OTHER; note = 2'-deoxy-2'-fluorocytidine-3'-phosphate
  modified_base 12: mod_base = OTHER; note = 2'-O-methyluridine-3'-phosphate
  modified_base 13: mod_base = OTHER; note = 2'-O-methylcytidine-3'-phosphate
  modified_base 14: mod_base = OTHER; note = 2'-O-methylguanosine-3'-phosphate
  modified_base 15: mod_base = OTHER; note = 2'-O-methylcytidine-3'-phosphate
  modified_base 16: mod_base = OTHER; note = 2'-O-methyluridine-3'-phosphate
  modified_base 17: mod_base = OTHER; note = 2'-O-methylcytidine-3'-phosphate
  modified_base 18: mod_base = OTHER; note = 2'-O-methyluridine-3'-phosphate
  modified_base 19: mod_base = OTHER; note = 2'-O-methylcytidine-3'-phosphate
  modified_base 20: mod_base = OTHER; note = 2'-O-methyladenosine-3'-phosphate
  modified_base 21: mod_base = OTHER; note = 2'-O-methyluridine-3'-phosphate ((2S,4R)-1-[29-[[2-(acetylamino)-2-deoxy-beta-D-galactopyra nosyl]oxy]-14,14-bis[[3-[[3-[[5-[[2-(acetylamino)-2-deoxy-b eta-D-galactopyranosyl]oxy]-1-oxopentyl]amino]propyl]amino] -3-oxopropoxy]methyl]-1,12,19,25-tetraoxo-16-oxa-13,20,24-t riazanonacos-1-yl]-4-hydroxy-2-pyrrolidinyl)methyl ester
attctgtgatctcgctctcat

SEQ ID NO: 236 - RNA, 21 nt, synthetic construct
  source 1..21: mol_type = other RNA
  modified_base 1: mod_base = OTHER; note = 2'-O-methylguanosine-3'-phosphorothioate
  modified_base 2: mod_base = OTHER; note = 2'-O-methyluridine-3'-phosphorothioate
  modified_base 3: mod_base = OTHER; note = 2'-O-methyluridine-3'-phosphate
  modified_base 4: mod_base = OTHER; note = 2'-O-methylcytidine-3'-phosphate
  modified_base 5: mod_base = OTHER; note = 2'-O-methyladenosine-3'-phosphate
  modified_base 6: mod_base = OTHER; note = 2'-O-methyluridine-3'-phosphate
  modified_base 7: mod_base = OTHER; note = 2'-deoxy-2'-fluorocytidine-3'-phosphate
  modified_base 8: mod_base = OTHER; note = 2'-O-methyladenosine-3'-phosphate
  modified_base 9: mod_base = OTHER; note = 2'-deoxy-2'-fluoroguanosine-3'-phosphate
  modified_base 10: mod_base = OTHER; note = 2'-deoxy-2'-fluorouridine-3'-phosphate
  modified_base 11: mod_base = OTHER; note = 2'-deoxy-2'-fluorouridine-3'-phosphate
  modified_base 12: mod_base = OTHER; note = 2'-O-methyluridine-3'-phosphate
  modified_base 13: mod_base = OTHER; note = 2'-O-methylguanosine-3'-phosphate
  modified_base 14: mod_base = OTHER; note = 2'-O-methylguanosine-3'-phosphate
  modified_base 15: mod_base = OTHER; note = 2'-O-methyladenosine-3'-phosphate
  modified_base 16: mod_base = OTHER; note = 2'-O-methylguanosine-3'-phosphate
  modified_base 17: mod_base = OTHER; note = 2'-O-methyladenosine-3'-phosphate
  modified_base 18: mod_base = OTHER; note = 2'-O-methyluridine-3'-phosphate
  modified_base 19: mod_base = OTHER; note = 2'-O-methyladenosine-3'-phosphate
  modified_base 20: mod_base = OTHER; note = 2'-O-methyladenosine-3'-phosphate
  modified_base 21: mod_base = OTHER; note = 2'-O-methyluridine-3'-phosphate ((2S,4R)-1-[29-[[2-(acetylamino)-2-deoxy-beta-D-galactopyra nosyl]oxy]-14,14-bis[[3-[[3-[[5-[[2-(acetylamino)-2-deoxy-b eta-D-galactopyranosyl]oxy]-1-oxopentyl]amino]propyl]amino] -3-oxopropoxy]methyl]-1,12,19,25-tetraoxo-16-oxa-13,20,24-t riazanonacos-1-yl]-4-hydroxy-2-pyrrolidinyl)methyl ester
gttcatcagtttggagataat

SEQ ID NO: 237 - RNA, 21 nt, synthetic construct
  source 1..21: mol_type = other RNA
  modified_base 1: mod_base = OTHER; note = 2'-O-methylcytidine-3'-phosphorothioate
  modified_base 2: mod_base = OTHER; note = 2'-O-methyladenosine-3'-phosphorothioate
  modified_base 3: mod_base = OTHER; note = 2'-O-methylcytidine-3'-phosphate
  modified_base 4: mod_base = OTHER; note = 2'-O-methyluridine-3'-phosphate
  modified_base 5: mod_base = OTHER; note = 2'-O-methyluridine-3'-phosphate
  modified_base 6: mod_base = OTHER; note = 2'-O-methyluridine-3'-phosphate
  modified_base 7: mod_base = OTHER; note = 2'-deoxy-2'-fluoroadenosine-3'-phosphate
  modified_base 8: mod_base = OTHER; note = 2'-O-methyladenosine-3'-phosphate
  modified_base 9: mod_base = OTHER; note = 2'-deoxy-2'-fluorouridine-3'-phosphate
  modified_base 10: mod_base = OTHER; note = 2'-deoxy-2'-fluorocytidine-3'-phosphate
  modified_base 11: mod_base = OTHER; note = 2'-deoxy-2'-fluorocytidine-3'-phosphate
  modified_base 12: mod_base = OTHER; note = 2'-O-methyluridine-3'-phosphate
  modified_base 13: mod_base = OTHER; note = 2'-O-methylcytidine-3'-phosphate
  modified_base 14: mod_base = OTHER; note = 2'-O-methyluridine-3'-phosphate
  modified_base 15: mod_base = OTHER; note = 2'-O-methyladenosine-3'-phosphate
  modified_base 16: mod_base = OTHER; note = 2'-O-methyluridine-3'-phosphate
  modified_base 17: mod_base = OTHER; note = 2'-O-methylcytidine-3'-phosphate
  modified_base 18: mod_base = OTHER; note = 2'-O-methylcytidine-3'-phosphate
  modified_base 19: mod_base = OTHER; note = 2'-O-methyladenosine-3'-phosphate
  modified_base 20: mod_base = OTHER; note = 2'-O-methylguanosine-3'-phosphate
  modified_base 21: mod_base = OTHER; note = 2'-O-methyladenosine-3'-phosphate ((2S,4R)-1-[29-[[2-(acetylamino)-2-deoxy-beta-D-galactopyra nosyl]oxy]-14,14-bis[[3-[[3-[[5-[[2-(acetylamino)-2-deoxy-b eta-D-galactopyranosyl]oxy]-1-oxopentyl]amino]propyl]amino] -3-oxopropoxy]methyl]-1,12,19,25-tetraoxo-16-oxa-13,20,24-t riazanonacos-1-yl]-4-hydroxy-2-pyrrolidinyl)methyl ester
cactttaatcctctatccaga

SEQ ID NO: 238 - RNA, 21 nt, synthetic construct
  source 1..21: mol_type = other RNA
  modified_base 1: mod_base = OTHER; note = 2'-O-methylguanosine-3'-phosphorothioate
  modified_base 2: mod_base = OTHER; note = 2'-O-methyluridine-3'-phosphorothioate
  modified_base 3: mod_base = OTHER; note = 2'-O-methylguanosine-3'-phosphate
  modified_base 4: mod_base = OTHER; note = 2'-O-methyluridine-3'-phosphate
  modified_base 5: mod_base = OTHER; note = 2'-O-methylcytidine-3'-phosphate
  modified_base 6: mod_base = OTHER; note = 2'-O-methyluridine-3'-phosphate
  modified_base 7: mod_base = OTHER; note = 2'-deoxy-2'-fluorouridine-3'-phosphate
  modified_base 8: mod_base = OTHER; note = 2'-O-methyluridine-3'-phosphate
  modified_base 9: mod_base = OTHER; note = 2'-deoxy-2'-fluorocytidine-3'-phosphate
  modified_base 10: mod_base = OTHER; note = 2'-deoxy-2'-fluoroguanosine-3'-phosphate
  modified_base 11: mod_base = OTHER; note = 2'-deoxy-2'-fluoroadenosine-3'-phosphate
  modified_base 12: mod_base = OTHER; note = 2'-O-methyladenosine-3'-phosphate
  modified_base 13: mod_base = OTHER; note = 2'-O-methylguanosine-3'-phosphate
  modified_base 14: mod_base = OTHER; note = 2'-O-methyladenosine-3'-phosphate
  modified_base 15: mod_base = OTHER; note = 2'-O-methyluridine-3'-phosphate
  modified_base 16: mod_base = OTHER; note = 2'-O-methyluridine-3'-phosphate
  modified_base 17: mod_base = OTHER; note = 2'-O-methylcytidine-3'-phosphate
  modified_base 18: mod_base = OTHER; note = 2'-O-methyluridine-3'-phosphate
  modified_base 19: mod_base = OTHER; note = 2'-O-methylguanosine-3'-phosphate
  modified_base 20: mod_base = OTHER; note = 2'-O-methyluridine-3'-phosphate
  modified_base 21: mod_base = OTHER; note = 2'-O-methyluridine-3'-phosphate ((2S,4R)-1-[29-[[2-(acetylamino)-2-deoxy-beta-D-galactopyra nosyl]oxy]-14,14-bis[[3-[[3-[[5-[[2-(acetylamino)-2-deoxy-b eta-D-galactopyranosyl]oxy]-1-oxopentyl]amino]propyl]amino] -3-oxopropoxy]methyl]-1,12,19,25-tetraoxo-16-oxa-13,20,24-t riazanonacos-1-yl]-4-hydroxy-2-pyrrolidinyl)methyl ester
gtgtctttcgaagattctgtt

SEQ ID NO: 239 - RNA, 21 nt, synthetic construct
  source 1..21: mol_type = other RNA
  modified_base 1: mod_base = OTHER; note = 2'-O-methylcytidine-3'-phosphorothioate
  modified_base 2: mod_base = OTHER; note = 2'-O-methylguanosine-3'-phosphorothioate
  modified_base 3: mod_base = OTHER; note = 2'-O-methyladenosine-3'-phosphate
  modified_base 4: mod_base = OTHER; note = 2'-O-methylguanosine-3'-phosphate
  modified_base 5: mod_base = OTHER; note = 2'-O-methylcytidine-3'-phosphate
  modified_base 6: mod_base = OTHER; note = 2'-O-methyladenosine-3'-phosphate
  modified_base 7: mod_base = OTHER; note = 2'-deoxy-2'-fluoroguanosine-3'-phosphate
  modified_base 8: mod_base = OTHER; note = 2'-O-methyladenosine-3'-phosphate
  modified_base 9: mod_base = OTHER; note = 2'-deoxy-2'-fluoroadenosine-3'-phosphate
  modified_base 10: mod_base = OTHER; note = 2'-deoxy-2'-fluoroguanosine-3'-phosphate
  modified_base 11: mod_base = OTHER; note = 2'-deoxy-2'-fluoroguanosine-3'-phosphate
  modified_base 12: mod_base = OTHER; note = 2'-O-methyladenosine-3'-phosphate
  modified_base 13: mod_base = OTHER; note = 2'-O-methyladenosine-3'-phosphate
  modified_base 14: mod_base = OTHER; note = 2'-O-methyladenosine-3'-phosphate
  modified_base 15: mod_base = OTHER; note = 2'-O-methylguanosine-3'-phosphate
  modified_base 16: mod_base = OTHER; note = 2'-O-methyluridine-3'-phosphate
  modified_base 17: mod_base = OTHER; note = 2'-O-methyladenosine-3'-phosphate
  modified_base 18: mod_base = OTHER; note = 2'-O-methyladenosine-3'-phosphate
  modified_base 19: mod_base = OTHER; note = 2'-O-methyluridine-3'-phosphate
  modified_base 20: mod_base = OTHER; note = 2'-O-methylguanosine-3'-phosphate
  modified_base 21: mod_base = OTHER; note = 2'-O-methyluridine-3'-phosphate ((2S,4R)-1-[29-[[2-(acetylamino)-2-deoxy-beta-D-galactopyra nosyl]oxy]-14,14-bis[[3-[[3-[[5-[[2-(acetylamino)-2-deoxy-b eta-D-galactopyranosyl]oxy]-1-oxopentyl]amino]propyl]amino] -3-oxopropoxy]methyl]-1,12,19,25-tetraoxo-16-oxa-13,20,24-t riazanonacos-1-yl]-4-hydroxy-2-pyrrolidinyl)methyl ester
cgagcagaaggaaagtaatgt

SEQ ID NO: 240 - RNA, 21 nt, synthetic construct
  source 1..21: mol_type = other RNA
  modified_base 1: mod_base = OTHER; note = 2'-O-methyluridine-3'-phosphorothioate
  modified_base 2: mod_base = OTHER; note = 2'-O-methylcytidine-3'-phosphorothioate
  modified_base 3: mod_base = OTHER; note = 2'-O-methylcytidine-3'-phosphate
  modified_base 4: mod_base = OTHER; note = 2'-O-methyladenosine-3'-phosphate
  modified_base 5: mod_base = OTHER; note = 2'-O-methyluridine-3'-phosphate
  modified_base 6: mod_base = OTHER; note = 2'-O-methylguanosine-3'-phosphate
  modified_base 7: mod_base = OTHER; note = 2'-deoxy-2'-fluorouridine-3'-phosphate
  modified_base 8: mod_base = OTHER; note = 2'-O-methyluridine-3'-phosphate
  modified_base 9: mod_base = OTHER; note = 2'-deoxy-2'-fluorocytidine-3'-phosphate
  modified_base 10: mod_base = OTHER; note = 2'-deoxy-2'-fluoroadenosine-3'-phosphate
  modified_base 11: mod_base = OTHER; note = 2'-deoxy-2'-fluorouridine-3'-phosphate
  modified_base 12: mod_base = OTHER; note = 2'-O-methylcytidine-3'-phosphate
  modified_base 13: mod_base = OTHER; note = 2'-O-methyladenosine-3'-phosphate
  modified_base 14: mod_base = OTHER; note = 2'-O-methylguanosine-3'-phosphate
  modified_base 15: mod_base = OTHER; note = 2'-O-methyluridine-3'-phosphate
  modified_base 16: mod_base = OTHER; note = 2'-O-methyluridine-3'-phosphate
  modified_base 17: mod_base = OTHER; note = 2'-O-methyluridine-3'-phosphate
  modified_base 18: mod_base = OTHER; note = 2'-O-methylguanosine-3'-phosphate
  modified_base 19: mod_base = OTHER; note = 2'-O-methylguanosine-3'-phosphate
  modified_base 20: mod_base = OTHER; note = 2'-O-methyladenosine-3'-phosphate
  modified_base 21: mod_base = OTHER; note = 2'-O-methyluridine-3'-phosphate ((2S,4R)-1-[29-[[2-(acetylamino)-2-deoxy-beta-D-galactopyra nosyl]oxy]-14,14-bis[[3-[[3-[[5-[[2-(acetylamino)-2-deoxy-b eta-D-galactopyranosyl]oxy]-1-oxopentyl]amino]propyl]amino] -3-oxopropoxy]methyl]-1,12,19,25-tetraoxo-16-oxa-13,20,24-t riazanonacos-1-yl]-4-hydroxy-2-pyrrolidinyl)methyl ester
tccatgttcatcagtttggat

SEQ ID NO: 241 - RNA, 21 nt, synthetic construct
  source 1..21: mol_type = other RNA
  modified_base 1: mod_base = OTHER; note = 2'-O-methylcytidine-3'-phosphorothioate
  modified_base 2: mod_base = OTHER; note = 2'-O-methylcytidine-3'-phosphorothioate
  modified_base 3: mod_base = OTHER; note = 2'-O-methyladenosine-3'-phosphate
  modified_base 4: mod_base = OTHER; note = 2'-O-methylguanosine-3'-phosphate
  modified_base 5: mod_base = OTHER; note = 2'-O-methyluridine-3'-phosphate
  modified_base 6: mod_base = OTHER; note = 2'-O-methylguanosine-3'-phosphate
  modified_base 7: mod_base = OTHER; note = 2'-deoxy-2'-fluorocytidine-3'-phosphate
  modified_base 8: mod_base = OTHER; note = 2'-O-methyladenosine-3'-phosphate
  modified_base 9: mod_base = OTHER; note = 2'-deoxy-2'-fluoroguanosine-3'-phosphate
  modified_base 10: mod_base = OTHER; note = 2'-deoxy-2'-fluoroguanosine-3'-phosphate
  modified_base 11: mod_base = OTHER; note = 2'-deoxy-2'-fluorouridine-3'-phosphate
  modified_base 12: mod_base = OTHER; note = 2'-O-methylcytidine-3'-phosphate
  modified_base 13: mod_base = OTHER; note = 2'-O-methylcytidine-3'-phosphate
  modified_base 14: mod_base = OTHER; note = 2'-O-methyluridine-3'-phosphate
  modified_base 15: mod_base = OTHER; note = 2'-O-methylcytidine-3'-phosphate
  modified_base 16: mod_base = OTHER; note = 2'-O-methyladenosine-3'-phosphate
  modified_base 17: mod_base = OTHER; note = 2'-O-methylcytidine-3'-phosphate
  modified_base 18: mod_base = OTHER; note = 2'-O-methyluridine-3'-phosphate
  modified_base 19: mod_base = OTHER; note = 2'-O-methyluridine-3'-phosphate
  modified_base 20: mod_base = OTHER; note = 2'-O-methyluridine-3'-phosphate
  modified_base 21: mod_base = OTHER; note = 2'-O-methyladenosine-3'-phosphate ((2S,4R)-1-[29-[[2-(acetylamino)-2-deoxy-beta-D-galactopyra nosyl]oxy]-14,14-bis[[3-[[3-[[5-[[2-(acetylamino)-2-deoxy-b eta-D-galactopyranosyl]oxy]-1-oxopentyl]amino]propyl]amino] -3-oxopropoxy]methyl]-1,12,19,25-tetraoxo-16-oxa-13,20,24-t riazanonacos-1-yl]-4-hydroxy-2-pyrrolidinyl)methyl ester
ccagtgcaggtcctcacttta

SEQ ID NO: 242 - RNA, 21 nt, synthetic construct
  source 1..21: mol_type = other RNA
  modified_base 1: mod_base = OTHER; note = 2'-O-methyladenosine-3'-phosphorothioate
  modified_base 2: mod_base = OTHER; note = 2'-O-methylguanosine-3'-phosphorothioate
  modified_base 3: mod_base = OTHER; note = 2'-O-methylguanosine-3'-phosphate
  modified_base 4: mod_base = OTHER; note = 2'-O-methyluridine-3'-phosphate
  modified_base 5: mod_base = OTHER; note = 2'-O-methylcytidine-3'-phosphate
  modified_base 6: mod_base = OTHER; note = 2'-O-methylcytidine-3'-phosphate
  modified_base 7: mod_base = OTHER; note = 2'-deoxy-2'-fluorouridine-3'-phosphate
  modified_base 8: mod_base = OTHER; note = 2'-O-methylcytidine-3'-phosphate
  modified_base 9: mod_base = OTHER; note = 2'-deoxy-2'-fluoroadenosine-3'-phosphate
  modified_base 10: mod_base = OTHER; note = 2'-deoxy-2'-fluorocytidine-3'-phosphate
  modified_base 11: mod_base = OTHER; note = 2'-deoxy-2'-fluorouridine-3'-phosphate
  modified_base 12: mod_base = OTHER; note = 2'-O-methyluridine-3'-phosphate
  modified_base 13: mod_base = OTHER; note = 2'-O-methyluridine-3'-phosphate
  modified_base 14: mod_base = OTHER; note = 2'-O-methyladenosine-3'-phosphate
  modified_base 15: mod_base = OTHER; note = 2'-O-methyladenosine-3'-phosphate
  modified_base 16: mod_base = OTHER; note = 2'-O-methyluridine-3'-phosphate
  modified_base 17: mod_base = OTHER; note = 2'-O-methylcytidine-3'-phosphate
  modified_base 18: mod_base = OTHER; note = 2'-O-methylcytidine-3'-phosphate
  modified_base 19: mod_base = OTHER; note = 2'-O-methyluridine-3'-phosphate
  modified_base 20: mod_base = OTHER; note = 2'-O-methylcytidine-3'-phosphate
  modified_base 21: mod_base = OTHER; note = 2'-O-methyluridine-3'-phosphate ((2S,4R)-1-[29-[[2-(acetylamino)-2-deoxy-beta-D-galactopyra nosyl]oxy]-14,14-bis[[3-[[3-[[5-[[2-(acetylamino)-2-deoxy-b eta-D-galactopyranosyl]oxy]-1-oxopentyl]amino]propyl]amino] -3-oxopropoxy]methyl]-1,12,19,25-tetraoxo-16-oxa-13,20,24-t riazanonacos-1-yl]-4-hydroxy-2-pyrrolidinyl)methyl ester
aggtcctcactttaatcctct

SEQ ID NO: 243 - RNA, 21 nt, synthetic construct
  source 1..21: mol_type = other RNA
  modified_base 1: mod_base = OTHER; note = 2'-O-methylguanosine-3'-phosphorothioate
  modified_base 2: mod_base = OTHER; note = 2'-O-methylcytidine-3'-phosphorothioate
  modified_base 3: mod_base = OTHER; note = 2'-O-methylcytidine-3'-phosphate
  modified_base 4: mod_base = OTHER; note = 2'-O-methyladenosine-3'-phosphate
  modified_base 5: mod_base = OTHER; note = 2'-O-methyladenosine-3'-phosphate
  modified_base 6: mod_base = OTHER; note = 2'-O-methylguanosine-3'-phosphate
  modified_base 7: mod_base = OTHER; note = 2'-deoxy-2'-fluoroguanosine-3'-phosphate
  modified_base 8: mod_base = OTHER; note = 2'-O-methyluridine-3'-phosphate
  modified_base 9: mod_base = OTHER; note = 2'-deoxy-2'-fluoroguanosine-3'-phosphate
  modified_base 10: mod_base = OTHER; note = 2'-deoxy-2'-fluorouridine-3'-phosphate
  modified_base 11: mod_base = OTHER; note = 2'-deoxy-2'-fluorocytidine-3'-phosphate
  modified_base 12: mod_base = OTHER; note = 2'-O-methyluridine-3'-phosphate
  modified_base 13: mod_base = OTHER; note = 2'-O-methyluridine-3'-phosphate
  modified_base 14: mod_base = OTHER; note = 2'-O-methyluridine-3'-phosphate
  modified_base 15: mod_base = OTHER; note = 2'-O-methylcytidine-3'-phosphate
  modified_base 16: mod_base = OTHER; note = 2'-O-methylguanosine-3'-phosphate
  modified_base 17: mod_base = OTHER; note = 2'-O-methyladenosine-3'-phosphate
  modified_base 18: mod_base = OTHER; note = 2'-O-methyladenosine-3'-phosphate
  modified_base 19: mod_base = OTHER; note = 2'-O-methylguanosine-3'-phosphate
  modified_base 20: mod_base = OTHER; note = 2'-O-methyladenosine-3'-phosphate
  modified_base 21: mod_base = OTHER; note = 2'-O-methyluridine-3'-phosphate ((2S,4R)-1-[29-[[2-(acetylamino)-2-deoxy-beta-D-galactopyra nosyl]oxy]-14,14-bis[[3-[[3-[[5-[[2-(acetylamino)-2-deoxy-b eta-D-galactopyranosyl]oxy]-1-oxopentyl]amino]propyl]amino] -3-oxopropoxy]methyl]-1,12,19,25-tetraoxo-16-oxa-13,20,24-t riazanonacos-1-yl]-4-hydroxy-2-pyrrolidinyl)methyl ester
gccaaggtgtctttcgaagat

SEQ ID NO: 244 - RNA, 21 nt, synthetic construct
  source 1..21: mol_type = other RNA
  modified_base 1: mod_base = OTHER; note = 2'-O-methyladenosine-3'-phosphorothioate
  modified_base 2: mod_base = OTHER; note = 2'-O-methylguanosine-3'-phosphorothioate
  modified_base 3: mod_base = OTHER; note = 2'-O-methyluridine-3'-phosphate
  modified_base 4: mod_base = OTHER; note = 2'-O-methyladenosine-3'-phosphate
  modified_base 5: mod_base = OTHER; note = 2'-O-methyladenosine-3'-phosphate
  modified_base 6: mod_base = OTHER; note = 2'-O-methyladenosine-3'-phosphate
  modified_base 7: mod_base = OTHER; note = 2'-deoxy-2'-fluoroadenosine-3'-phosphate
  modified_base 8: mod_base = OTHER; note = 2'-O-methyladenosine-3'-phosphate
  modified_base 9: mod_base = OTHER; note = 2'-deoxy-2'-fluoroguanosine-3'-phosphate
  modified_base 10: mod_base = OTHER; note = 2'-deoxy-2'-fluoroadenosine-3'-phosphate
  modified_base 11: mod_base = OTHER; note = 2'-deoxy-2'-fluorocytidine-3'-phosphate
  modified_base 12: mod_base = OTHER; note = 2'-O-methyladenosine-3'-phosphate
  modified_base 13: mod_base = OTHER; note = 2'-O-methylguanosine-3'-phosphate
  modified_base 14: mod_base = OTHER; note = 2'-O-methylguanosine-3'-phosphate
  modified_base 15: mod_base = OTHER; note = 2'-O-methyladenosine-3'-phosphate
  modified_base 16: mod_base = OTHER; note = 2'-O-methyladenosine-3'-phosphate
  modified_base 17: mod_base = OTHER; note = 2'-O-methyladenosine-3'-phosphate
  modified_base 18: mod_base = OTHER; note = 2'-O-methylcytidine-3'-phosphate
  modified_base 19: mod_base = OTHER; note = 2'-O-methylguanosine-3'-phosphate
  modified_base 20: mod_base = OTHER; note = 2'-O-methylcytidine-3'-phosphate
  modified_base 21: mod_base = OTHER; note = 2'-O-methyluridine-3'-phosphate ((2S,4R)-1-[29-[[2-(acetylamino)-2-deoxy-beta-D-galactopyra nosyl]oxy]-14,14-bis[[3-[[3-[[5-[[2-(acetylamino)-2-deoxy-b eta-D-galactopyranosyl]oxy]-1-oxopentyl]amino]propyl]amino] -3-oxopropoxy]methyl]-1,12,19,25-tetraoxo-16-oxa-13,20,24-t riazanonacos-1-yl]-4-hydroxy-2-pyrrolidinyl)methyl ester
agtaaaaagacaggaaacgct

SEQ ID NO: 245 - RNA, 21 nt, synthetic construct
  source 1..21: mol_type = other RNA
  modified_base 1: mod_base = OTHER; note = 2'-O-methyladenosine-3'-phosphorothioate
  modified_base 2: mod_base = OTHER; note = 2'-O-methyluridine-3'-phosphorothioate
  modified_base 3: mod_base = OTHER; note = 2'-O-methyladenosine-3'-phosphate
  modified_base 4: mod_base = OTHER; note = 2'-O-methylcytidine-3'-phosphate
  modified_base 5: mod_base = OTHER; note = 2'-O-methyladenosine-3'-phosphate
  modified_base 6: mod_base = OTHER; note = 2'-O-methylcytidine-3'-phosphate
  modified_base 7: mod_base = OTHER; note = 2'-deoxy-2'-fluoroadenosine-3'-phosphate
  modified_base 8: mod_base = OTHER; note = 2'-O-methyladenosine-3'-phosphate
  modified_base 9: mod_base = OTHER; note = 2'-deoxy-2'-fluoroguanosine-3'-phosphate
  modified_base 10: mod_base = OTHER; note = 2'-deoxy-2'-fluoroguanosine-3'-phosphate
  modified_base 11: mod_base = OTHER; note = 2'-deoxy-2'-fluorocytidine-3'-phosphate
  modified_base 12: mod_base = OTHER; note = 2'-O-methyluridine-3'-phosphate
  modified_base 13: mod_base = OTHER; note = 2'-O-methylguanosine-3'-phosphate
  modified_base 14: mod_base = OTHER; note = 2'-O-methyluridine-3'-phosphate
  modified_base 15: mod_base = OTHER; note = 2'-O-methyladenosine-3'-phosphate
  modified_base 16: mod_base = OTHER; note = 2'-O-methylcytidine-3'-phosphate
  modified_base 17: mod_base = OTHER; note = 2'-O-methylcytidine-3'-phosphate
  modified_base 18: mod_base = OTHER; note = 2'-O-methyladenosine-3'-phosphate
  modified_base 19: mod_base = OTHER; note = 2'-O-methylguanosine-3'-phosphate
  modified_base 20: mod_base = OTHER; note = 2'-O-methyluridine-3'-phosphate
  modified_base 21: mod_base = OTHER; note = 2'-O-methyluridine-3'-phosphate ((2S,4R)-1-[29-[[2-(acetylamino)-2-deoxy-beta-D-galactopyra nosyl]oxy]-14,14-bis[[3-[[3-[[5-[[2-(acetylamino)-2-deoxy-b eta-D-galactopyranosyl]oxy]-1-oxopentyl]amino]propyl]amino] -3-oxopropoxy]methyl]-1,12,19,25-tetraoxo-16-oxa-13,20,24-t riazanonacos-1-yl]-4-hydroxy-2-pyrrolidinyl)methyl ester
atacacaaggctgtaccagtt

SEQ ID NO: 246 - RNA, 21 nt, synthetic construct
  source 1..21: mol_type = other RNA
  modified_base 1: mod_base = OTHER; note = 2'-O-methyladenosine-3'-phosphorothioate
  modified_base 2: mod_base = OTHER; note = 2'-O-methyladenosine-3'-phosphorothioate
  modified_base 3: mod_base = OTHER; note = 2'-O-methyluridine-3'-phosphate
  modified_base 4: mod_base = OTHER; note = 2'-O-methylcytidine-3'-phosphate
  modified_base 5: mod_base = OTHER; note = 2'-O-methylcytidine-3'-phosphate
  modified_base 6: mod_base = OTHER; note = 2'-O-methyluridine-3'-phosphate
  modified_base 7: mod_base = OTHER; note = 2'-deoxy-2'-fluorocytidine-3'-phosphate
  modified_base 8: mod_base = OTHER; note = 2'-O-methyluridine-3'-phosphate
  modified_base 9: mod_base = OTHER; note = 2'-deoxy-2'-fluoroadenosine-3'-phosphate
  modified_base 10: mod_base = OTHER; note = 2'-deoxy-2'-fluorouridine-3'-phosphate
  modified_base 11: mod_base = OTHER; note = 2'-deoxy-2'-fluorocytidine-3'-phosphate
  modified_base 12: mod_base = OTHER; note = 2'-O-methylcytidine-3'-phosphate
  modified_base 13: mod_base = OTHER; note = 2'-O-methyladenosine-3'-phosphate
  modified_base 14: mod_base = OTHER; note = 2'-O-methylguanosine-3'-phosphate
  modified_base 15: mod_base = OTHER; note = 2'-O-methyladenosine-3'-phosphate
  modified_base 16: mod_base = OTHER; note = 2'-O-methylcytidine-3'-phosphate
  modified_base 17: mod_base = OTHER; note = 2'-O-methyladenosine-3'-phosphate
  modified_base 18: mod_base = OTHER; note = 2'-O-methyladenosine-3'-phosphate
  modified_base 19: mod_base = OTHER; note = 2'-O-methylcytidine-3'-phosphate
  modified_base 20: mod_base = OTHER; note = 2'-O-methyladenosine-3'-phosphate
  modified_base 21: mod_base = OTHER; note = 2'-O-methyluridine-3'-phosphate ((2S,4R)-1-[29-[[2-(acetylamino)-2-deoxy-beta-D-galactopyra nosyl]oxy]-14,14-bis[[3-[[3-[[5-[[2-(acetylamino)-2-deoxy-b eta-D-galactopyranosyl]oxy]-1-oxopentyl]amino]propyl]amino] -3-oxopropoxy]methyl]-1,12,19,25-tetraoxo-16-oxa-13,20,24-t riazanonacos-1-yl]-4-hydroxy-2-pyrrolidinyl)methyl ester
aatcctctatccagacaacat

SEQ ID NO: 247 - RNA, 21 nt, synthetic construct
  source 1..21: mol_type = other RNA
  modified_base 1: mod_base = OTHER; note = 2'-O-methyluridine-3'-phosphorothioate
  modified_base 2: mod_base = OTHER; note = 2'-O-methylcytidine-3'-phosphorothioate
  modified_base 3: mod_base = OTHER; note = 2'-O-methylguanosine-3'-phosphate
  modified_base 4: mod_base = OTHER; note = 2'-O-methyladenosine-3'-phosphate
  modified_base 5: mod_base = OTHER; note = 2'-O-methylguanosine-3'-phosphate
  modified_base 6: mod_base = OTHER; note = 2'-O-methylcytidine-3'-phosphate
  modified_base 7: mod_base = OTHER; note = 2'-deoxy-2'-fluoroadenosine-3'-phosphate
  modified_base 8: mod_base = OTHER; note = 2'-O-methylguanosine-3'-phosphate
  modified_base 9: mod_base = OTHER; note = 2'-deoxy-2'-fluoroadenosine-3'-phosphate
  modified_base 10: mod_base = OTHER; note = 2'-deoxy-2'-fluoroadenosine-3'-phosphate
  modified_base 11: mod_base = OTHER; note = 2'-deoxy-2'-fluoroguanosine-3'-phosphate
  modified_base 12: mod_base = OTHER; note = 2'-O-methylguanosine-3'-phosphate
  modified_base 13: mod_base = OTHER; note = 2'-O-methyladenosine-3'-phosphate
  modified_base 14: mod_base = OTHER; note = 2'-O-methyladenosine-3'-phosphate
  modified_base 15: mod_base = OTHER; note = 2'-O-methyladenosine-3'-phosphate
  modified_base 16: mod_base = OTHER; note = 2'-O-methylguanosine-3'-phosphate
  modified_base 17: mod_base = OTHER; note = 2'-O-methyluridine-3'-phosphate
  modified_base 18: mod_base = OTHER; note = 2'-O-methyladenosine-3'-phosphate
  modified_base 19: mod_base = OTHER; note = 2'-O-methyladenosine-3'-phosphate
  modified_base 20: mod_base = OTHER; note = 2'-O-methyluridine-3'-phosphate
  modified_base 21: mod_base = OTHER; note = 2'-O-methyluridine-3'-phosphate ((2S,4R)-1-[29-[[2-(acetylamino)-2-deoxy-beta-D-galactopyra nosyl]oxy]-14,14-bis[[3-[[3-[[5-[[2-(acetylamino)-2-deoxy-b eta-D-galactopyranosyl]oxy]-1-oxopentyl]amino]propyl]amino] -3-oxopropoxy]methyl]-1,12,19,25-tetraoxo-16-oxa-13,20,24-t riazanonacos-1-yl]-4-hydroxy-2-pyrrolidinyl)methyl ester
tcgagcagaaggaaagtaatt

SEQ ID NO: 248 - RNA, 21 nt, synthetic construct
  source 1..21: mol_type = other RNA
  modified_base 1: mod_base = OTHER; note = 2'-O-methyluridine-3'-phosphorothioate
  modified_base 2: mod_base = OTHER; note = 2'-O-methylcytidine-3'-phosphorothioate
  modified_base 3: mod_base = OTHER; note = 2'-O-methyladenosine-3'-phosphate
  modified_base 4: mod_base = OTHER; note = 2'-O-methylcytidine-3'-phosphate
  modified_base 5: mod_base = OTHER; note = 2'-O-methyluridine-3'-phosphate
  modified_base 6: mod_base = OTHER; note = 2'-O-methyluridine-3'-phosphate
  modified_base 7: mod_base = OTHER; note = 2'-deoxy-2'-fluorouridine-3'-phosphate
  modified_base 8: mod_base = OTHER; note = 2'-O-methyladenosine-3'-phosphate
  modified_base 9: mod_base = OTHER; note = 2'-deoxy-2'-fluoroadenosine-3'-phosphate
  modified_base 10: mod_base = OTHER; note = 2'-deoxy-2'-fluorouridine-3'-phosphate
  modified_base 11: mod_base = OTHER; note = 2'-deoxy-2'-fluorocytidine-3'-phosphate
  modified_base 12: mod_base = OTHER; note = 2'-O-methylcytidine-3'-phosphate
  modified_base 13: mod_base = OTHER; note = 2'-O-methyluridine-3'-phosphate
  modified_base 14: mod_base = OTHER; note = 2'-O-methylcytidine-3'-phosphate
  modified_base 15: mod_base = OTHER; note = 2'-O-methyluridine-3'-phosphate
  modified_base 16: mod_base = OTHER; note = 2'-O-methyladenosine-3'-phosphate
  modified_base 17: mod_base = OTHER; note = 2'-O-methyluridine-3'-phosphate
  modified_base 18: mod_base = OTHER; note = 2'-O-methylcytidine-3'-phosphate
  modified_base 19: mod_base = OTHER; note = 2'-O-methylcytidine-3'-phosphate
  modified_base 20: mod_base = OTHER; note = 2'-O-methyladenosine-3'-phosphate
  modified_base 21: mod_base = OTHER; note = 2'-O-methyluridine-3'-phosphate ((2S,4R)-1-[29-[[2-(acetylamino)-2-deoxy-beta-D-galactopyra nosyl]oxy]-14,14-bis[[3-[[3-[[5-[[2-(acetylamino)-2-deoxy-b eta-D-galactopyranosyl]oxy]-1-oxopentyl]amino]propyl]amino] -3-oxopropoxy]methyl]-1,12,19,25-tetraoxo-16-oxa-13,20,24-t riazanonacos-1-yl]-4-hydroxy-2-pyrrolidinyl)methyl ester
tcactttaatcctctatccat

SEQ ID NO: 249 - RNA, 21 nt, synthetic construct
  source 1..21: mol_type = other RNA
  modified_base 1: mod_base = OTHER; note = 2'-O-methylcytidine-3'-phosphorothioate
  modified_base 2: mod_base = OTHER; note = 2'-O-methyladenosine-3'-phosphorothioate
  modified_base 3: mod_base = OTHER; note = 2'-O-methylguanosine-3'-phosphate
  modified_base 4: mod_base = OTHER; note = 2'-O-methyladenosine-3'-phosphate
  modified_base 5: mod_base = OTHER; note = 2'-O-methyladenosine-3'-phosphate
  modified_base 6: mod_base = OTHER; note = 2'-O-methylguanosine-3'-phosphate
  modified_base 7: mod_base = OTHER; note = 2'-deoxy-2'-fluoroguanosine-3'-phosphate
  modified_base 8: mod_base = OTHER; note = 2'-O-methyladenosine-3'-phosphate
  modified_base 9: mod_base = OTHER; note = 2'-deoxy-2'-fluoroadenosine-3'-phosphate
  modified_base 10: mod_base = OTHER; note = 2'-deoxy-2'-fluoroadenosine-3'-phosphate
  modified_base 11: mod_base = OTHER; note = 2'-deoxy-2'-fluoroguanosine-3'-phosphate
  modified_base 12: mod_base = OTHER; note = 2'-O-methyluridine-3'-phosphate
  modified_base 13: mod_base = OTHER; note = 2'-O-methyladenosine-3'-phosphate
  modified_base 14: mod_base = OTHER; note = 2'-O-methyladenosine-3'-phosphate
  modified_base 15: mod_base = OTHER; note = 2'-O-methyluridine-3'-phosphate
  modified_base 16: mod_base = OTHER; note = 2'-O-methylguanosine-3'-phosphate
  modified_base 17: mod_base = OTHER; note = 2'-O-methylguanosine-3'-phosphate
  modified_base 18: mod_base = OTHER; note = 2'-O-methyladenosine-3'-phosphate
  modified_base 19: mod_base = OTHER; note = 2'-O-methylcytidine-3'-phosphate
  modified_base 20: mod_base = OTHER; note = 2'-O-methylcytidine-3'-phosphate
  modified_base 21: mod_base = OTHER; note = 2'-O-methyladenosine-3'-phosphate ((2S,4R)-1-[29-[[2-(acetylamino)-2-deoxy-beta-D-galactopyra nosyl]oxy]-14,14-bis[[3-[[3-[[5-[[2-(acetylamino)-2-deoxy-b eta-D-galactopyranosyl]oxy]-1-oxopentyl]amino]propyl]amino] -3-oxopropoxy]methyl]-1,12,19,25-tetraoxo-16-oxa-13,20,24-t riazanonacos-1-yl]-4-hydroxy-2-pyrrolidinyl)methyl ester
cagaaggaaagtaatggacca

SEQ ID NO: 250 - RNA, 21 nt, synthetic construct
  source 1..21: mol_type = other RNA
  modified_base 1: mod_base = OTHER; note = 2'-O-methylcytidine-3'-phosphorothioate
  modified_base 2: mod_base = OTHER; note = 2'-O-methyladenosine-3'-phosphorothioate
  modified_base 3: mod_base = OTHER; note = 2'-O-methyladenosine-3'-phosphate
  modified_base 4: mod_base = OTHER; note = 2'-O-methyluridine-3'-phosphate
  modified_base 5: mod_base = OTHER; note = 2'-O-methyluridine-3'-phosphate
  modified_base 6: mod_base = OTHER; note = 2'-O-methyluridine-3'-phosphate
  modified_base 7: mod_base = OTHER; note = 2'-deoxy-2'-fluorocytidine-3'-phosphate
  modified_base 8: mod_base = OTHER; note = 2'-O-methylguanosine-3'-phosphate
  modified_base 9: mod_base = OTHER; note = 2'-deoxy-2'-fluoroadenosine-3'-phosphate
  modified_base 10: mod_base = OTHER; note = 2'-deoxy-2'-fluoroguanosine-3'-phosphate
  modified_base 11: mod_base = OTHER; note = 2'-deoxy-2'-fluorocytidine-3'-phosphate
  modified_base 12: mod_base = OTHER; note = 2'-O-methyladenosine-3'-phosphate
  modified_base 13: mod_base = OTHER; note = 2'-O-methylguanosine-3'-phosphate
  modified_base 14: mod_base = OTHER; note = 2'-O-methyladenosine-3'-phosphate
  modified_base 15: mod_base = OTHER; note = 2'-O-methyladenosine-3'-phosphate
  modified_base 16: mod_base = OTHER; note = 2'-O-methylguanosine-3'-phosphate
  modified_base 17: mod_base = OTHER; note = 2'-O-methylguanosine-3'-phosphate
  modified_base 18: mod_base = OTHER; note = 2'-O-methyladenosine-3'-phosphate
  modified_base 19: mod_base = OTHER; note = 2'-O-methyladenosine-3'-phosphate
  modified_base 20: mod_base = OTHER; note = 2'-O-methyladenosine-3'-phosphate
  modified_base 21: mod_base = OTHER; note = 2'-O-methyluridine-3'-phosphate ((2S,4R)-1-[29-[[2-(acetylamino)-2-deoxy-beta-D-galactopyra nosyl]oxy]-14,14-bis[[3-[[3-[[5-[[2-(acetylamino)-2-deoxy-b eta-D-galactopyranosyl]oxy]-1-oxopentyl]amino]propyl]amino] -3-oxopropoxy]methyl]-1,12,19,25-tetraoxo-16-oxa-13,20,24-t riazanonacos-1-yl]-4-hydroxy-2-pyrrolidinyl)methyl ester
caatttcgagcagaaggaaat

SEQ ID NO: 251 - RNA, 21 nt, synthetic construct
  source 1..21: mol_type = other RNA
  modified_base 1: mod_base = OTHER; note = 2'-O-methyladenosine-3'-phosphorothioate
  modified_base 2: mod_base = OTHER; note = 2'-O-methyladenosine-3'-phosphorothioate
  modified_base 3: mod_base = OTHER; note = 2'-O-methylguanosine-3'-phosphate
  modified_base 4: mod_base = OTHER; note = 2'-O-methylguanosine-3'-phosphate
  modified_base 5: mod_base = OTHER; note = 2'-O-methyladenosine-3'-phosphate
  modified_base 6: mod_base = OTHER; note = 2'-O-methyladenosine-3'-phosphate
  modified_base 7: mod_base = OTHER; note = 2'-deoxy-2'-fluoroadenosine-3'-phosphate
  modified_base 8: mod_base = OTHER; note = 2'-O-methylguanosine-3'-phosphate
  modified_base 9: mod_base = OTHER; note = 2'-deoxy-2'-fluorouridine-3'-phosphate
  modified_base 10: mod_base = OTHER; note = 2'-deoxy-2'-fluoroadenosine-3'-phosphate
  modified_base 11: mod_base = OTHER; note = 2'-deoxy-2'-fluoroadenosine-3'-phosphate
  modified_base 12: mod_base = OTHER; note = 2'-O-methyluridine-3'-phosphate
  modified_base 13: mod_base = OTHER; note = 2'-O-methylguanosine-3'-phosphate
  modified_base 14: mod_base = OTHER; note = 2'-O-methylguanosine-3'-phosphate
  modified_base 15: mod_base = OTHER; note = 2'-O-methyladenosine-3'-phosphate
  modified_base 16: mod_base = OTHER; note = 2'-O-methylcytidine-3'-phosphate
  modified_base 17: mod_base = OTHER; note = 2'-O-methylcytidine-3'-phosphate
  modified_base 18: mod_base = OTHER; note = 2'-O-methyladenosine-3'-phosphate
  modified_base 19: mod_base = OTHER; note = 2'-O-methylguanosine-3'-phosphate
  modified_base 20: mod_base = OTHER; note = 2'-O-methyluridine-3'-phosphate
  modified_base 21: mod_base = OTHER; note = 2'-O-methyluridine-3'-phosphate ((2S,4R)-1-[29-[[2-(acetylamino)-2-deoxy-beta-D-galactopyra nosyl]oxy]-14,14-bis[[3-[[3-[[5-[[2-(acetylamino)-2-deoxy-b eta-D-galactopyranosyl]oxy]-1-oxopentyl]amino]propyl]amino] -3-oxopropoxy]methyl]-1,12,19,25-tetraoxo-16-oxa-13,20,24-t riazanonacos-1-yl]-4-hydroxy-2-pyrrolidinyl)methyl ester
aaggaaagtaatggaccagtt

SEQ ID NO: 252 - RNA, 21 nt, synthetic construct
  source 1..21: mol_type = other RNA
  modified_base 1: mod_base = OTHER; note = 2'-O-methyladenosine-3'-phosphorothioate
  modified_base 2: mod_base = OTHER; note = 2'-O-methylguanosine-3'-phosphorothioate
  modified_base 3: mod_base = OTHER; note = 2'-O-methyluridine-3'-phosphate
  modified_base 4: mod_base = OTHER; note = 2'-O-methylguanosine-3'-phosphate
  modified_base 5: mod_base = OTHER; note = 2'-O-methylcytidine-3'-phosphate
  modified_base 6: mod_base = OTHER; note = 2'-O-methyladenosine-3'-phosphate
  modified_base 7: mod_base = OTHER; note = 2'-deoxy-2'-fluoroguanosine-3'-phosphate
  modified_base 8: mod_base = OTHER; note = 2'-O-methylguanosine-3'-phosphate
  modified_base 9: mod_base = OTHER; note = 2'-deoxy-2'-fluorouridine-3'-phosphate
  modified_base 10: mod_base = OTHER; note = 2'-deoxy-2'-fluorocytidine-3'-phosphate
  modified_base 11: mod_base = OTHER; note = 2'-deoxy-2'-fluorocytidine-3'-phosphate
  modified_base 12: mod_base = OTHER; note = 2'-O-methyluridine-3'-phosphate
  modified_base 13: mod_base = OTHER; note = 2'-O-methylcytidine-3'-phosphate
  modified_base 14: mod_base = OTHER; note = 2'-O-methyladenosine-3'-phosphate
  modified_base 15: mod_base = OTHER; note = 2'-O-methylcytidine-3'-phosphate
  modified_base 16: mod_base = OTHER; note = 2'-O-methyluridine-3'-phosphate
  modified_base 17: mod_base = OTHER; note = 2'-O-methyluridine-3'-phosphate
  modified_base 18: mod_base = OTHER; note = 2'-O-methyluridine-3'-phosphate
  modified_base 19: mod_base = OTHER; note = 2'-O-methyladenosine-3'-phosphate
  modified_base 20: mod_base = OTHER; note = 2'-O-methyladenosine-3'-phosphate
  modified_base 21: mod_base = OTHER; note = 2'-O-methyluridine-3'-phosphate ((2S,4R)-1-[29-[[2-(acetylamino)-2-deoxy-beta-D-galactopyra nosyl]oxy]-14,14-bis[[3-[[3-[[5-[[2-(acetylamino)-2-deoxy-b eta-D-galactopyranosyl]oxy]-1-oxopentyl]amino]propyl]amino] -3-oxopropoxy]methyl]-1,12,19,25-tetraoxo-16-oxa-13,20,24-t riazanonacos-1-yl]-4-hydroxy-2-pyrrolidinyl)methyl ester
agtgcaggtcctcactttaat

SEQ ID NO: 253 - RNA, 21 nt, synthetic construct
  source 1..21: mol_type = other RNA
  modified_base 1: mod_base = OTHER; note = 2'-O-methylguanosine-3'-phosphorothioate
  modified_base 2: mod_base = OTHER; note = 2'-O-methyladenosine-3'-phosphorothioate
  modified_base 3: mod_base = OTHER; note = 2'-O-methyluridine-3'-phosphate
  modified_base 4: mod_base = OTHER; note = 2'-O-methyluridine-3'-phosphate
  modified_base 5: mod_base = OTHER; note = 2'-O-methylcytidine-3'-phosphate
  modified_base 6: mod_base = OTHER; note = 2'-O-methylcytidine-3'-phosphate
  modified_base 7: mod_base = OTHER; note = 2'-deoxy-2'-fluoroadenosine-3'-phosphate
  modified_base 8: mod_base = OTHER; note = 2'-O-methyluridine-3'-phosphate
  modified_base 9: mod_base = OTHER; note = 2'-deoxy-2'-fluoroguanosine-3'-phosphate
  modified_base 10: mod_base = OTHER; note = 2'-deoxy-2'-fluorouridine-3'-phosphate
  modified_base 11: mod_base = OTHER; note = 2'-deoxy-2'-fluorouridine-3'-phosphate
  modified_base 12: mod_base = OTHER; note = 2'-O-methylcytidine-3'-phosphate
  modified_base 13: mod_base = OTHER; note = 2'-O-methyladenosine-3'-phosphate
  modified_base 14: mod_base = OTHER; note = 2'-O-methyluridine-3'-phosphate
  modified_base 15: mod_base = OTHER; note = 2'-O-methylcytidine-3'-phosphate
  modified_base 16: mod_base = OTHER; note = 2'-O-methyladenosine-3'-phosphate
  modified_base 17: mod_base = OTHER; note = 2'-O-methylguanosine-3'-phosphate
  modified_base 18: mod_base = OTHER; note = 2'-O-methyluridine-3'-phosphate
  modified_base 19: mod_base = OTHER; note = 2'-O-methyluridine-3'-phosphate
  modified_base 20: mod_base = OTHER; note = 2'-O-methyluridine-3'-phosphate
  modified_base 21: mod_base = OTHER; note = 2'-O-methylguanosine-3'-phosphate ((2S,4R)-1-[29-[[2-(acetylamino)-2-deoxy-beta-D-galactopyra nosyl]oxy]-14,14-bis[[3-[[3-[[5-[[2-(acetylamino)-2-deoxy-b eta-D-galactopyranosyl]oxy]-1-oxopentyl]amino]propyl]amino] -3-oxopropoxy]methyl]-1,12,19,25-tetraoxo-16-oxa-13,20,24-t riazanonacos-1-yl]-4-hydroxy-2-pyrrolidinyl)methyl ester
gattccatgttcatcagtttg

SEQ ID NO: 254 - RNA, 21 nt, synthetic construct
  source 1..21: mol_type = other RNA
  modified_base 1: mod_base = OTHER; note = 2'-O-methylcytidine-3'-phosphorothioate
  modified_base 2: mod_base = OTHER; note = 2'-O-methyluridine-3'-phosphorothioate
  modified_base 3: mod_base = OTHER; note = 2'-O-methyluridine-3'-phosphate
  modified_base 4: mod_base = OTHER; note = 2'-O-methyluridine-3'-phosphate
  modified_base 5: mod_base = OTHER; note = 2'-O-methylcytidine-3'-phosphate
  modified_base 6: mod_base = OTHER; note = 2'-O-methylguanosine-3'-phosphate
  modified_base 7: mod_base = OTHER; note = 2'-deoxy-2'-fluoroadenosine-3'-phosphate
  modified_base 8: mod_base = OTHER; note = 2'-O-methyladenosine-3'-phosphate
  modified_base 9: mod_base = OTHER; note = 2'-deoxy-2'-fluoroguanosine-3'-phosphate
  modified_base 10: mod_base = OTHER; note = 2'-deoxy-2'-fluoroadenosine-3'-phosphate
  modified_base 11: mod_base = OTHER; note = 2'-deoxy-2'-fluorouridine-3'-phosphate
  modified_base 12: mod_base = OTHER; note = 2'-O-methyluridine-3'-phosphate
  modified_base 13: mod_base = OTHER; note = 2'-O-methylcytidine-3'-phosphate
  modified_base 14: mod_base = OTHER; note = 2'-O-methyluridine-3'-phosphate
  modified_base 15: mod_base = OTHER; note = 2'-O-methylguanosine-3'-phosphate
  modified_base 16: mod_base = OTHER; note = 2'-O-methyluridine-3'-phosphate
  modified_base 17: mod_base = OTHER; note = 2'-O-methylguanosine-3'-phosphate
  modified_base 18: mod_base = OTHER; note = 2'-O-methyladenosine-3'-phosphate
  modified_base 19: mod_base = OTHER; note = 2'-O-methyluridine-3'-phosphate
  modified_base 20: mod_base = OTHER; note = 2'-O-methylcytidine-3'-phosphate
  modified_base 21: mod_base = OTHER; note = 2'-O-methyluridine-3'-phosphate ((2S,4R)-1-[29-[[2-(acetylamino)-2-deoxy-beta-D-galactopyra nosyl]oxy]-14,14-bis[[3-[[3-[[5-[[2-(acetylamino)-2-deoxy-b eta-D-galactopyranosyl]oxy]-1-oxopentyl]amino]propyl]amino] -3-oxopropoxy]methyl]-1,12,19,25-tetraoxo-16-oxa-13,20,24-t riazanonacos-1-yl]-4-hydroxy-2-pyrrolidinyl)methyl ester
ctttcgaagattctgtgatct

SEQ ID NO: 255 - RNA, 21 nt, synthetic construct
  source 1..21: mol_type = other RNA
  modified_base 1: mod_base = OTHER; note = 2'-O-methyluridine-3'-phosphorothioate
  modified_base 2: mod_base = OTHER; note = 2'-O-methyluridine-3'-phosphorothioate
  modified_base 3: mod_base = OTHER; note = 2'-O-methyluridine-3'-phosphate
  modified_base 4: mod_base = OTHER; note = 2'-O-methylcytidine-3'-phosphate
  modified_base 5: mod_base = OTHER; note = 2'-O-methylguanosine-3'-phosphate
  modified_base 6: mod_base = OTHER; note = 2'-O-methyladenosine-3'-phosphate
  modified_base 7: mod_base = OTHER; note = 2'-deoxy-2'-fluoroguanosine-3'-phosphate
  modified_base 8: mod_base = OTHER; note = 2'-O-methylcytidine-3'-phosphate
  modified_base 9: mod_base = OTHER; note = 2'-deoxy-2'-fluoroadenosine-3'-phosphate
  modified_base 10: mod_base = OTHER; note = 2'-deoxy-2'-fluoroguanosine-3'-phosphate
  modified_base 11: mod_base = OTHER; note = 2'-deoxy-2'-fluoroadenosine-3'-phosphate
  modified_base 12: mod_base = OTHER; note = 2'-O-methyladenosine-3'-phosphate
  modified_base 13: mod_base = OTHER; note = 2'-O-methylguanosine-3'-phosphate
  modified_base 14: mod_base = OTHER; note = 2'-O-methylguanosine-3'-phosphate
  modified_base 15: mod_base = OTHER; note = 2'-O-methyladenosine-3'-phosphate
  modified_base 16: mod_base = OTHER; note = 2'-O-methyladenosine-3'-phosphate
  modified_base 17: mod_base = OTHER; note = 2'-O-methyladenosine-3'-phosphate
  modified_base 18: mod_base = OTHER; note = 2'-O-methylguanosine-3'-phosphate
  modified_base 19: mod_base = OTHER; note = 2'-O-methyluridine-3'-phosphate
  modified_base 20: mod_base = OTHER; note = 2'-O-methyladenosine-3'-phosphate
  modified_base 21: mod_base = OTHER; note = 2'-O-methyladenosine-3'-phosphate ((2S,4R)-1-[29-[[2-(acetylamino)-2-deoxy-beta-D-galactopyra nosyl]oxy]-14,14-bis[[3-[[3-[[5-[[2-(acetylamino)-2-deoxy-b eta-D-galactopyranosyl]oxy]-1-oxopentyl]amino]propyl]amino] -3-oxopropoxy]methyl]-1,12,19,25-tetraoxo-16-oxa-13,20,24-t riazanonacos-1-yl]-4-hydroxy-2-pyrrolidinyl)methyl ester
tttcgagcagaaggaaagtaa

SEQ ID NO: 256 - RNA, 21 nt, synthetic construct
  source 1..21: mol_type = other RNA
  modified_base 1: mod_base = OTHER; note = 2'-O-methyluridine-3'-phosphorothioate
  modified_base 2: mod_base = OTHER; note = 2'-O-methyladenosine-3'-phosphorothioate
  modified_base 3: mod_base = OTHER; note = 2'-O-methyladenosine-3'-phosphate
  modified_base 4: mod_base = OTHER; note = 2'-O-methyluridine-3'-phosphate
  modified_base 5: mod_base = OTHER; note = 2'-O-methylcytidine-3'-phosphate
  modified_base 6: mod_base = OTHER; note = 2'-O-methylcytidine-3'-phosphate
  modified_base 7: mod_base = OTHER; note = 2'-deoxy-2'-fluorouridine-3'-phosphate
  modified_base 8: mod_base = OTHER; note = 2'-O-methylcytidine-3'-phosphate
  modified_base 9: mod_base = OTHER; note = 2'-deoxy-2'-fluorouridine-3'-phosphate
  modified_base 10: mod_base = OTHER; note = 2'-deoxy-2'-fluoroadenosine-3'-phosphate
  modified_base 11: mod_base = OTHER; note = 2'-deoxy-2'-fluorouridine-3'-phosphate
  modified_base 12: mod_base = OTHER; note = 2'-O-methylcytidine-3'-phosphate
  modified_base 13: mod_base = OTHER; note = 2'-O-methylcytidine-3'-phosphate
  modified_base 14: mod_base = OTHER; note = 2'-O-methyladenosine-3'-phosphate
  modified_base 15: mod_base = OTHER; note = 2'-O-methylguanosine-3'-phosphate
  modified_base 16: mod_base = OTHER; note = 2'-O-methyladenosine-3'-phosphate
  modified_base 17: mod_base = OTHER; note = 2'-O-methylcytidine-3'-phosphate
  modified_base 18: mod_base = OTHER; note = 2'-O-methyladenosine-3'-phosphate
  modified_base 19: mod_base = OTHER; note = 2'-O-methyladenosine-3'-phosphate
  modified_base 20: mod_base = OTHER; note = 2'-O-methylcytidine-3'-phosphate
  modified_base 21: mod_base = OTHER; note = 2'-O-methyladenosine-3'-phosphate ((2S,4R)-1-[29-[[2-(acetylamino)-2-deoxy-beta-D-galactopyra nosyl]oxy]-14,14-bis[[3-[[3-[[5-[[2-(acetylamino)-2-deoxy-b eta-D-galactopyranosyl]oxy]-1-oxopentyl]amino]propyl]amino] -3-oxopropoxy]methyl]-1,12,19,25-tetraoxo-16-oxa-13,20,24-t riazanonacos-1-yl]-4-hydroxy-2-pyrrolidinyl)methyl ester
taatcctctatccagacaaca

SEQ ID NO: 257 - RNA, 21 nt, synthetic construct
  source 1..21: mol_type = other RNA
  modified_base 1: mod_base = OTHER; note = 2'-O-methyluridine-3'-phosphorothioate
  modified_base 2: mod_base = OTHER; note = 2'-O-methylguanosine-3'-phosphorothioate
  modified_base 3: mod_base = OTHER; note = 2'-O-methyluridine-3'-phosphate
  modified_base 4: mod_base = OTHER; note = 2'-O-methyluridine-3'-phosphate
  modified_base 5: mod_base = OTHER; note = 2'-O-methylcytidine-3'-phosphate
  modified_base 6: mod_base = OTHER; note = 2'-O-methyladenosine-3'-phosphate
  modified_base 7: mod_base = OTHER; note = 2'-deoxy-2'-fluorouridine-3'-phosphate
  modified_base 8: mod_base = OTHER; note = 2'-O-methylcytidine-3'-phosphate
  modified_base 9: mod_base = OTHER; note = 2'-deoxy-2'-fluoroadenosine-3'-phosphate
  modified_base 10: mod_base = OTHER; note = 2'-deoxy-2'-fluoroguanosine-3'-phosphate
  modified_base 11: mod_base = OTHER; note = 2'-deoxy-2'-fluorouridine-3'-phosphate
  modified_base 12: mod_base = OTHER; note = 2'-O-methyluridine-3'-phosphate
  modified_base 13: mod_base = OTHER; note = 2'-O-methyluridine-3'-phosphate
  modified_base 14: mod_base = OTHER; note = 2'-O-methylguanosine-3'-phosphate
  modified_base 15: mod_base = OTHER; note = 2'-O-methylguanosine-3'-phosphate
  modified_base 16: mod_base = OTHER; note = 2'-O-methyladenosine-3'-phosphate
  modified_base 17: mod_base = OTHER; note = 2'-O-methylguanosine-3'-phosphate
  modified_base 18: mod_base = OTHER; note = 2'-O-methyladenosine-3'-phosphate
  modified_base 19: mod_base = OTHER; note = 2'-O-methyluridine-3'-phosphate
  modified_base 20: mod_base = OTHER; note = 2'-O-methyladenosine-3'-phosphate
  modified_base 21: mod_base = OTHER; note = 2'-O-methyladenosine-3'-phosphate ((2S,4R)-1-[29-[[2-(acetylamino)-2-deoxy-beta-D-galactopyra nosyl]oxy]-14,14-bis[[3-[[3-[[5-[[2-(acetylamino)-2-deoxy-b eta-D-galactopyranosyl]oxy]-1-oxopentyl]amino]propyl]amino] -3-oxopropoxy]methyl]-1,12,19,25-tetraoxo-16-oxa-13,20,24-t riazanonacos-1-yl]-4-hydroxy-2-pyrrolidinyl)methyl ester
tgttcatcagtttggagataa

SEQ ID NO: 258 - RNA, 21 nt, synthetic construct
  source 1..21: mol_type = other RNA
  modified_base 1: mod_base = OTHER; note = 2'-O-methylguanosine-3'-phosphorothioate
  modified_base 2: mod_base = OTHER; note = 2'-O-methyluridine-3'-phosphorothioate
  modified_base 3: mod_base = OTHER; note = 2'-O-methylguanosine-3'-phosphate
  modified_base 4: mod_base = OTHER; note = 2'-O-methylcytidine-3'-phosphate
  modified_base 5: mod_base = OTHER; note = 2'-O-methyladenosine-3'-phosphate
  modified_base 6: mod_base = OTHER; note = 2'-O-methylguanosine-3'-phosphate
  modified_base 7: mod_base = OTHER; note = 2'-deoxy-2'-fluoroguanosine-3'-phosphate
  modified_base 8: mod_base = OTHER; note = 2'-O-methyluridine-3'-phosphate
  modified_base 9: mod_base = OTHER; note = 2'-deoxy-2'-fluorocytidine-3'-phosphate
  modified_base 10: mod_base = OTHER; note = 2'-deoxy-2'-fluorocytidine-3'-phosphate
  modified_base 11: mod_base = OTHER; note = 2'-deoxy-2'-fluorouridine-3'-phosphate
  modified_base 12: mod_base = OTHER; note = 2'-O-methylcytidine-3'-phosphate
  modified_base 13: mod_base = OTHER; note = 2'-O-methyladenosine-3'-phosphate
  modified_base 14: mod_base = OTHER; note = 2'-O-methylcytidine-3'-phosphate
  modified_base 15: mod_base = OTHER; note = 2'-O-methyluridine-3'-phosphate
  modified_base 16: mod_base = OTHER; note = 2'-O-methyluridine-3'-phosphate
  modified_base 17: mod_base = OTHER; note = 2'-O-methyluridine-3'-phosphate
  modified_base 18: mod_base = OTHER; note = 2'-O-methyladenosine-3'-phosphate
  modified_base 19: mod_base = OTHER; note = 2'-O-methyladenosine-3'-phosphate
  modified_base 20: mod_base = OTHER; note = 2'-O-methyluridine-3'-phosphate
  modified_base 21: mod_base = OTHER; note = 2'-O-methyluridine-3'-phosphate ((2S,4R)-1-[29-[[2-(acetylamino)-2-deoxy-beta-D-galactopyra nosyl]oxy]-14,14-bis[[3-[[3-[[5-[[2-(acetylamino)-2-deoxy-b eta-D-galactopyranosyl]oxy]-1-oxopentyl]amino]propyl]amino] -3-oxopropoxy]methyl]-1,12,19,25-tetraoxo-16-oxa-13,20,24-t riazanonacos-1-yl]-4-hydroxy-2-pyrrolidinyl)methyl ester
gtgcaggtcctcactttaatt

SEQ ID NO: 259 - RNA, 21 nt, synthetic construct
  source 1..21: mol_type = other RNA
  modified_base 1: mod_base = OTHER; note = 2'-O-methyluridine-3'-phosphorothioate
  modified_base 2: mod_base = OTHER; note = 2'-O-methyladenosine-3'-phosphorothioate
  modified_base 3: mod_base = OTHER; note = 2'-O-methyladenosine-3'-phosphate
  modified_base 4: mod_base = OTHER; note = 2'-O-methyluridine-3'-phosphate
  modified_base 5: mod_base = OTHER; note = 2'-O-methylguanosine-3'-phosphate
  modified_base 6: mod_base = OTHER; note = 2'-O-methylguanosine-3'-phosphate
  modified_base 7: mod_base = OTHER; note = 2'-deoxy-2'-fluoroadenosine-3'-phosphate
  modified_base 8: mod_base = OTHER; note = 2'-O-methylcytidine-3'-phosphate
  modified_base 9: mod_base = OTHER; note = 2'-deoxy-2'-fluorocytidine-3'-phosphate
  modified_base 10: mod_base = OTHER; note = 2'-deoxy-2'-fluoroadenosine-3'-phosphate
  modified_base 11: mod_base = OTHER; note = 2'-deoxy-2'-fluoroguanosine-3'-phosphate
  modified_base 12: mod_base = OTHER; note = 2'-O-methyluridine-3'-phosphate
  modified_base 13: mod_base = OTHER; note = 2'-O-methylguanosine-3'-phosphate
  modified_base 14: mod_base = OTHER; note = 2'-O-methyladenosine-3'-phosphate
  modified_base 15: mod_base = OTHER; note = 2'-O-methyladenosine-3'-phosphate
  modified_base 16: mod_base = OTHER; note = 2'-O-methylguanosine-3'-phosphate
  modified_base 17: mod_base = OTHER; note = 2'-O-methylguanosine-3'-phosphate
  modified_base 18: mod_base = OTHER; note = 2'-O-methyluridine-3'-phosphate
  modified_base 19: mod_base = OTHER; note = 2'-O-methylguanosine-3'-phosphate
  modified_base 20: mod_base = OTHER; note = 2'-O-methyluridine-3'-phosphate
  modified_base 21: mod_base = OTHER; note = 2'-O-methyluridine-3'-phosphate ((2S,4R)-1-[29-[[2-(acetylamino)-2-deoxy-beta-D-galactopyra nosyl]oxy]-14,14-bis[[3-[[3-[[5-[[2-(acetylamino)-2-deoxy-b eta-D-galactopyranosyl]oxy]-1-oxopentyl]amino]propyl]amino] -3-oxopropoxy]methyl]-1,12,19,25-tetraoxo-16-oxa-13,20,24-t riazanonacos-1-yl]-4-hydroxy-2-pyrrolidinyl)methyl ester
taatggaccagtgaaggtgtt

SEQ ID NO: 260 - RNA, 21 nt, synthetic construct
  source 1..21: mol_type = other RNA
  modified_base 1: mod_base = OTHER; note = 2'-O-methyluridine-3'-phosphorothioate
  modified_base 2: mod_base = OTHER; note = 2'-O-methyluridine-3'-phosphorothioate
  modified_base 3: mod_base = OTHER; note = 2'-O-methyladenosine-3'-phosphate
  modified_base 4: mod_base = OTHER; note = 2'-O-methyladenosine-3'-phosphate
  modified_base 5: mod_base = OTHER; note = 2'-O-methyluridine-3'-phosphate
  modified_base 6: mod_base = OTHER; note = 2'-O-methylcytidine-3'-phosphate
  modified_base 7: mod_base = OTHER; note = 2'-deoxy-2'-fluorocytidine-3'-phosphate
  modified_base 8: mod_base = OTHER; note = 2'-O-methyluridine-3'-phosphate
  modified_base 9: mod_base = OTHER; note = 2'-deoxy-2'-fluorocytidine-3'-phosphate
  modified_base 10: mod_base = OTHER; note = 2'-deoxy-2'-fluorouridine-3'-phosphate
  modified_base 11: mod_base = OTHER; note = 2'-deoxy-2'-fluoroadenosine-3'-phosphate
  modified_base 12: mod_base = OTHER; note = 2'-O-methyluridine-3'-phosphate
  modified_base 13: mod_base = OTHER; note = 2'-O-methylcytidine-3'-phosphate
  modified_base 14: mod_base = OTHER; note = 2'-O-methylcytidine-3'-phosphate
  modified_base 15: mod_base = OTHER; note = 2'-O-methyladenosine-3'-phosphate
  modified_base 16: mod_base = OTHER; note = 2'-O-methylguanosine-3'-phosphate
  modified_base 17: mod_base = OTHER; note = 2'-O-methyladenosine-3'-phosphate
  modified_base 18: mod_base = OTHER; note = 2'-O-methylcytidine-3'-phosphate
  modified_base 19: mod_base = OTHER; note = 2'-O-methyladenosine-3'-phosphate
  modified_base 20: mod_base = OTHER; note = 2'-O-methyladenosine-3'-phosphate
  modified_base 21: mod_base = OTHER; note = 2'-O-methyluridine-3'-phosphate ((2S,4R)-1-[29-[[2-(acetylamino)-2-deoxy-beta-D-galactopyra nosyl]oxy]-14,14-bis[[3-[[3-[[5-[[2-(acetylamino)-2-deoxy-b eta-D-galactopyranosyl]oxy]-1-oxopentyl]amino]propyl]amino] -3-oxopropoxy]methyl]-1,12,19,25-tetraoxo-16-oxa-13,20,24-t riazanonacos-1-yl]-4-hydroxy-2-pyrrolidinyl)methyl ester
ttaatcctctatccagacaat

SEQ ID NO: 261 - RNA, 21 nt, synthetic construct
  source 1..21: mol_type = other RNA
  modified_base 1: mod_base = OTHER; note = 2'-O-methyluridine-3'-phosphorothioate
  modified_base 2: mod_base = OTHER; note = 2'-O-methylcytidine-3'-phosphorothioate
  modified_base 3: mod_base = OTHER; note = 2'-O-methyladenosine-3'-phosphate
  modified_base 4: mod_base = OTHER; note = 2'-O-methylguanosine-3'-phosphate
  modified_base 5: mod_base = OTHER; note = 2'-O-methylguanosine-3'-phosphate
  modified_base 6: mod_base = OTHER; note = 2'-O-methyladenosine-3'-phosphate
  modified_base 7: mod_base = OTHER; note = 2'-deoxy-2'-fluoroguanosine-3'-phosphate
  modified_base 8: mod_base = OTHER; note = 2'-O-methyladenosine-3'-phosphate
  modified_base 9: mod_base = OTHER; note = 2'-deoxy-2'-fluorocytidine-3'-phosphate
  modified_base 10: mod_base = OTHER; note = 2'-deoxy-2'-fluorocytidine-3'-phosphate
  modified_base 11: mod_base = OTHER; note = 2'-deoxy-2'-fluoroadenosine-3'-phosphate
  modified_base 12: mod_base = OTHER; note = 2'-O-methyluridine-3'-phosphate
  modified_base 13: mod_base = OTHER; note = 2'-O-methyluridine-3'-phosphate
  modified_base 14: mod_base = OTHER; note = 2'-O-methylcytidine-3'-phosphate
  modified_base 15: mod_base = OTHER; note = 2'-O-methylcytidine-3'-phosphate
  modified_base 16: mod_base = OTHER; note = 2'-O-methyladenosine-3'-phosphate
  modified_base 17: mod_base = OTHER; note = 2'-O-methyluridine-3'-phosphate
  modified_base 18: mod_base = OTHER; note = 2'-O-methylcytidine-3'-phosphate
  modified_base 19: mod_base = OTHER; note = 2'-O-methyladenosine-3'-phosphate
  modified_base 20: mod_base = OTHER; note = 2'-O-methyluridine-3'-phosphate
  modified_base 21: mod_base = OTHER; note = 2'-O-methyluridine-3'-phosphate ((2S,4R)-1-[29-[[2-(acetylamino)-2-deoxy-beta-D-galactopyra nosyl]oxy]-14,14-bis[[3-[[3-[[5-[[2-(acetylamino)-2-deoxy-b eta-D-galactopyranosyl]oxy]-1-oxopentyl]amino]propyl]amino] -3-oxopropoxy]methyl]-1,12,19,25-tetraoxo-16-oxa-13,20,24-t riazanonacos-1-yl]-4-hydroxy-2-pyrrolidinyl)methyl ester
tcaggagaccattccatcatt

SEQ ID NO: 262 - RNA, 21 nt, synthetic construct
  source 1..21: mol_type = other RNA
  modified_base 1: mod_base = OTHER; note = 2'-O-methylcytidine-3'-phosphorothioate
  modified_base 2: mod_base = OTHER; note = 2'-O-methyladenosine-3'-phosphorothioate
  modified_base 3: mod_base = OTHER; note = 2'-O-methylcytidine-3'-phosphate
  modified_base 4: mod_base = OTHER; note = 2'-O-methylcytidine-3'-phosphate
  modified_base 5: mod_base = OTHER; note = 2'-O-methyladenosine-3'-phosphate
  modified_base 6: mod_base = OTHER; note = 2'-O-methyluridine-3'-phosphate
  modified_base 7: mod_base = OTHER; note = 2'-deoxy-2'-fluorocytidine-3'-phosphate
  modified_base 8: mod_base = OTHER; note = 2'-O-methyladenosine-3'-phosphate
  modified_base 9: mod_base = OTHER; note = 2'-deoxy-2'-fluoroadenosine-3'-phosphate
  modified_base 10: mod_base = OTHER; note = 2'-deoxy-2'-fluorouridine-3'-phosphate
  modified_base 11: mod_base = OTHER; note = 2'-deoxy-2'-fluorouridine-3'-phosphate
  modified_base 12: mod_base = OTHER; note = 2'-O-methyluridine-3'-phosphate
  modified_base 13: mod_base = OTHER; note = 2'-O-methylcytidine-3'-phosphate
  modified_base 14: mod_base = OTHER; note = 2'-O-methylguanosine-3'-phosphate
  modified_base 15: mod_base = OTHER; note = 2'-O-methyladenosine-3'-phosphate
  modified_base 16: mod_base = OTHER; note = 2'-O-methylguanosine-3'-phosphate
  modified_base 17: mod_base = OTHER; note = 2'-O-methylcytidine-3'-phosphate
  modified_base 18: mod_base = OTHER; note = 2'-O-methyladenosine-3'-phosphate
  modified_base 19: mod_base = OTHER; note = 2'-O-methylguanosine-3'-phosphate
  modified_base 20: mod_base = OTHER; note = 2'-O-methyladenosine-3'-phosphate
  modified_base 21: mod_base = OTHER; note = 2'-O-methyladenosine-3'-phosphate ((2S,4R)-1-[29-[[2-(acetylamino)-2-deoxy-beta-D-galactopyra nosyl]oxy]-14,14-bis[[3-[[3-[[5-[[2-(acetylamino)-2-deoxy-b eta-D-galactopyranosyl]oxy]-1-oxopentyl]amino]propyl]amino] -3-oxopropoxy]methyl]-1,12,19,25-tetraoxo-16-oxa-13,20,24-t riazanonacos-1-yl]-4-hydroxy-2-pyrrolidinyl)methyl ester
caccatcaatttcgagcagaa

SEQ ID NO: 263 - RNA, 21 nt, synthetic construct
  source 1..21: mol_type = other RNA
  modified_base 1: mod_base = OTHER; note = 2'-O-methylguanosine-3'-phosphorothioate
  modified_base 2: mod_base = OTHER; note = 2'-O-methylcytidine-3'-phosphorothioate
  modified_base 3: mod_base = OTHER; note = 2'-O-methyladenosine-3'-phosphate
  modified_base 4: mod_base = OTHER; note = 2'-O-methylguanosine-3'-phosphate
  modified_base 5: mod_base = OTHER; note = 2'-O-methylguanosine-3'-phosphate
  modified_base 6: mod_base = OTHER; note = 2'-O-methyluridine-3'-phosphate
  modified_base 7: mod_base = OTHER; note = 2'-deoxy-2'-fluorocytidine-3'-phosphate
  modified_base 8: mod_base = OTHER; note = 2'-O-methylcytidine-3'-phosphate
  modified_base 9: mod_base = OTHER; note = 2'-deoxy-2'-fluorouridine-3'-phosphate
  modified_base 10: mod_base = OTHER; note = 2'-deoxy-2'-fluorocytidine-3'-phosphate
  modified_base 11: mod_base = OTHER; note = 2'-deoxy-2'-fluoroadenosine-3'-phosphate
  modified_base 12: mod_base = OTHER; note = 2'-O-methylcytidine-3'-phosphate
  modified_base 13: mod_base = OTHER; note = 2'-O-methyluridine-3'-phosphate
  modified_base 14: mod_base = OTHER; note = 2'-O-methyluridine-3'-phosphate
  modified_base 15: mod_base = OTHER; note = 2'-O-methyluridine-3'-phosphate
  modified_base 16: mod_base = OTHER; note = 2'-O-methyladenosine-3'-phosphate
  modified_base 17: mod_base = OTHER; note = 2'-O-methyladenosine-3'-phosphate
  modified_base 18: mod_base = OTHER; note = 2'-O-methyluridine-3'-phosphate
  modified_base 19: mod_base = OTHER; note = 2'-O-methylcytidine-3'-phosphate
  modified_base 20: mod_base = OTHER; note = 2'-O-methylcytidine-3'-phosphate
  modified_base 21: mod_base = OTHER; note = 2'-O-methyluridine-3'-phosphate ((2S,4R)-1-[29-[[2-(acetylamino)-2-deoxy-beta-D-galactopyra nosyl]oxy]-14,14-bis[[3-[[3-[[5-[[2-(acetylamino)-2-deoxy-b eta-D-galactopyranosyl]oxy]-1-oxopentyl]amino]propyl]amino] -3-oxopropoxy]methyl]-1,12,19,25-tetraoxo-16-oxa-13,20,24-t riazanonacos-1-yl]-4-hydroxy-2-pyrrolidinyl)methyl ester
gcaggtcctcactttaatcct

SEQ ID NO: 264 - RNA, 21 nt, synthetic construct
  source 1..21: mol_type = other RNA
  modified_base 1: mod_base = OTHER; note = 2'-O-methyluridine-3'-phosphorothioate
  modified_base 2: mod_base = OTHER; note = 2'-O-methyluridine-3'-phosphorothioate
  modified_base 3: mod_base = OTHER; note = 2'-O-methyluridine-3'-phosphate
  modified_base 4: mod_base = OTHER; note = 2'-O-methylcytidine-3'-phosphate
  modified_base 5: mod_base = OTHER; note = 2'-O-methylguanosine-3'-phosphate
  modified_base 6: mod_base = OTHER; note = 2'-O-methyladenosine-3'-phosphate
  modified_base 7: mod_base = OTHER; note = 2'-deoxy-2'-fluoroadenosine-3'-phosphate
  modified_base 8: mod_base = OTHER; note = 2'-O-methylguanosine-3'-phosphate
  modified_base 9: mod_base = OTHER; note = 2'-deoxy-2'-fluoroadenosine-3'-phosphate
  modified_base 10: mod_base = OTHER; note = 2'-deoxy-2'-fluorouridine-3'-phosphate
  modified_base 11: mod_base = OTHER; note = 2'-deoxy-2'-fluorouridine-3'-phosphate
  modified_base 12: mod_base = OTHER; note = 2'-O-methylcytidine-3'-phosphate
  modified_base 13: mod_base = OTHER; note = 2'-O-methyluridine-3'-phosphate
  modified_base 14: mod_base = OTHER; note = 2'-O-methylguanosine-3'-phosphate
  modified_base 15: mod_base = OTHER; note = 2'-O-methyluridine-3'-phosphate
  modified_base 16: mod_base = OTHER; note = 2'-O-methylguanosine-3'-phosphate
  modified_base 17: mod_base = OTHER; note = 2'-O-methyladenosine-3'-phosphate
  modified_base 18: mod_base = OTHER; note = 2'-O-methyluridine-3'-phosphate
  modified_base 19: mod_base = OTHER; note = 2'-O-methylcytidine-3'-phosphate
  modified_base 20: mod_base = OTHER; note = 2'-O-methyluridine-3'-phosphate
  modified_base 21: mod_base = OTHER; note = 2'-O-methyluridine-3'-phosphate ((2S,4R)-1-[29-[[2-(acetylamino)-2-deoxy-beta-D-galactopyra nosyl]oxy]-14,14-bis[[3-[[3-[[5-[[2-(acetylamino)-2-deoxy-b eta-D-galactopyranosyl]oxy]-1-oxopentyl]amino]propyl]amino] -3-oxopropoxy]methyl]-1,12,19,25-tetraoxo-16-oxa-13,20,24-t riazanonacos-1-yl]-4-hydroxy-2-pyrrolidinyl)methyl ester
tttcgaagattctgtgatctt

SEQ ID NO: 265 - RNA, 21 nt, synthetic construct
  source 1..21: mol_type = other RNA
  modified_base 1: mod_base = OTHER; note = 2'-O-methyluridine-3'-phosphorothioate
  modified_base 2: mod_base = OTHER; note = 2'-O-methylguanosine-3'-phosphorothioate
  modified_base 3: mod_base = OTHER; note = 2'-O-methylcytidine-3'-phosphate
  modified_base 4: mod_base = OTHER; note = 2'-O-methyladenosine-3'-phosphate
  modified_base 5: mod_base = OTHER; note = 2'-O-methyluridine-3'-phosphate
  modified_base 6: mod_base = OTHER; note = 2'-O-methylguanosine-3'-phosphate
  modified_base 7: mod_base = OTHER; note = 2'-deoxy-2'-fluoroguanosine-3'-phosphate
  modified_base 8: mod_base = OTHER; note = 2'-O-methyladenosine-3'-phosphate
  modified_base 9: mod_base = OTHER; note = 2'-deoxy-2'-fluorouridine-3'-phosphate
  modified_base 10: mod_base = OTHER; note = 2'-deoxy-2'-fluorouridine-3'-phosphate
  modified_base 11: mod_base = OTHER; note = 2'-deoxy-2'-fluorocytidine-3'-phosphate
  modified_base 12: mod_base = OTHER; note = 2'-O-methylcytidine-3'-phosphate
  modified_base 13: mod_base = OTHER; note = 2'-O-methyladenosine-3'-phosphate
  modified_base 14: mod_base = OTHER; note = 2'-O-methyluridine-3'-phosphate
  modified_base 15: mod_base = OTHER; note = 2'-O-methylguanosine-3'-phosphate
  modified_base 16: mod_base = OTHER; note = 2'-O-methyluridine-3'-phosphate
  modified_base 17: mod_base = OTHER; note = 2'-O-methyluridine-3'-phosphate
  modified_base 18: mod_base = OTHER; note = 2'-O-methylcytidine-3'-phosphate
  modified_base 19: mod_base = OTHER; note = 2'-O-methyladenosine-3'-phosphate
  modified_base 20: mod_base = OTHER; note = 2'-O-methyluridine-3'-phosphate
  modified_base 21: mod_base = OTHER; note = 2'-O-methyluridine-3'-phosphate ((2S,4R)-1-[29-[[2-(acetylamino)-2-deoxy-beta-D-galactopyra nosyl]oxy]-14,14-bis[[3-[[3-[[5-[[2-(acetylamino)-2-deoxy-b eta-D-galactopyranosyl]oxy]-1-oxopentyl]amino]propyl]amino] -3-oxopropoxy]methyl]-1,12,19,25-tetraoxo-16-oxa-13,20,24-t riazanonacos-1-yl]-4-hydroxy-2-pyrrolidinyl)methyl ester
tgcatggattccatgttcatt

SEQ ID NO: 266 - RNA, 21 nt, synthetic construct
  source 1..21: mol_type = other RNA
  modified_base 1: mod_base = OTHER; note = 2'-O-methyladenosine-3'-phosphorothioate
  modified_base 2: mod_base = OTHER; note = 2'-O-methyluridine-3'-phosphorothioate
  modified_base 3: mod_base = OTHER; note = 2'-O-methylcytidine-3'-phosphate
  modified_base 4: mod_base = OTHER; note = 2'-O-methylcytidine-3'-phosphate
  modified_base 5: mod_base = OTHER; note = 2'-O-methyluridine-3'-phosphate
  modified_base 6: mod_base = OTHER; note = 2'-O-methylcytidine-3'-phosphate
  modified_base 7: mod_base = OTHER; note = 2'-deoxy-2'-fluorouridine-3'-phosphate
  modified_base 8: mod_base = OTHER; note = 2'-O-methyladenosine-3'-phosphate
  modified_base 9: mod_base = OTHER; note = 2'-deoxy-2'-fluorouridine-3'-phosphate
  modified_base 10: mod_base = OTHER; note = 2'-deoxy-2'-fluorocytidine-3'-phosphate
  modified_base 11: mod_base = OTHER; note = 2'-deoxy-2'-fluorocytidine-3'-phosphate
  modified_base 12: mod_base = OTHER; note = 2'-O-methyladenosine-3'-phosphate
  modified_base 13: mod_base = OTHER; note = 2'-O-methylguanosine-3'-phosphate
  modified_base 14: mod_base = OTHER; note = 2'-O-methyladenosine-3'-phosphate
  modified_base 15: mod_base = OTHER; note = 2'-O-methylcytidine-3'-phosphate
  modified_base 16: mod_base = OTHER; note = 2'-O-methyladenosine-3'-phosphate
  modified_base 17: mod_base = OTHER; note = 2'-O-methyladenosine-3'-phosphate
  modified_base 18: mod_base = OTHER; note = 2'-O-methylcytidine-3'-phosphate
  modified_base 19: mod_base = OTHER; note = 2'-O-methyladenosine-3'-phosphate
  modified_base 20: mod_base = OTHER; note = 2'-O-methylcytidine-3'-phosphate
  modified_base 21: mod_base = OTHER; note = 2'-O-methyluridine-3'-phosphate ((2S,4R)-1-[29-[[2-(acetylamino)-2-deoxy-beta-D-galactopyra nosyl]oxy]-14,14-bis[[3-[[3-[[5-[[2-(acetylamino)-2-deoxy-b eta-D-galactopyranosyl]oxy]-1-oxopentyl]amino]propyl]amino] -3-oxopropoxy]methyl]-1,12,19,25-tetraoxo-16-oxa-13,20,24-t riazanonacos-1-yl]-4-hydroxy-2-pyrrolidinyl)methyl ester
atcctctatccagacaacact

SEQ ID NO: 267 - RNA, 21 nt, synthetic construct
  source 1..21: mol_type = other RNA
  modified_base 1: mod_base = OTHER; note = 2'-O-methyladenosine-3'-phosphorothioate
  modified_base 2: mod_base = OTHER; note = 2'-O-methylguanosine-3'-phosphorothioate
  modified_base 3: mod_base = OTHER; note = 2'-O-methyladenosine-3'-phosphate
  modified_base 4: mod_base = OTHER; note = 2'-O-methyluridine-3'-phosphate
  modified_base 5: mod_base = OTHER; note = 2'-O-methyluridine-3'-phosphate
  modified_base 6: mod_base = OTHER; note = 2'-O-methylcytidine-3'-phosphate
  modified_base 7: mod_base = OTHER; note = 2'-deoxy-2'-fluorouridine-3'-phosphate
  modified_base 8: mod_base = OTHER; note = 2'-O-methylguanosine-3'-phosphate
  modified_base 9: mod_base = OTHER; note = 2'-deoxy-2'-fluorouridine-3'-phosphate
  modified_base 10: mod_base = OTHER; note = 2'-deoxy-2'-fluoroguanosine-3'-phosphate
  modified_base 11: mod_base = OTHER; note = 2'-deoxy-2'-fluoroadenosine-3'-phosphate
  modified_base 12: mod_base = OTHER; note = 2'-O-methyluridine-3'-phosphate
  modified_base 13: mod_base = OTHER; note = 2'-O-methylcytidine-3'-phosphate
  modified_base 14: mod_base = OTHER; note = 2'-O-methyluridine-3'-phosphate
  modified_base 15: mod_base = OTHER; note = 2'-O-methylcytidine-3'-phosphate
  modified_base 16: mod_base = OTHER; note = 2'-O-methylguanosine-3'-phosphate
  modified_base 17: mod_base = OTHER; note = 2'-O-methylcytidine-3'-phosphate
  modified_base 18: mod_base = OTHER; note = 2'-O-methyluridine-3'-phosphate
  modified_base 19: mod_base = OTHER; note = 2'-O-methylcytidine-3'-phosphate
  modified_base 20: mod_base = OTHER; note = 2'-O-methyluridine-3'-phosphate
  modified_base 21: mod_base = OTHER; note = 2'-O-methyluridine-3'-phosphate ((2S,4R)-1-[29-[[2-(acetylamino)-2-deoxy-beta-D-galactopyra nosyl]oxy]-14,14-bis[[3-[[3-[[5-[[2-(acetylamino)-2-deoxy-b eta-D-galactopyranosyl]oxy]-1-oxopentyl]amino]propyl]amino] -3-oxopropoxy]methyl]-1,12,19,25-tetraoxo-16-oxa-13,20,24-t riazanonacos-1-yl]-4-hydroxy-2-pyrrolidinyl)methyl ester
agattctgtgatctcgctctt

SEQ ID NO: 268 - RNA, 21 nt, synthetic construct
  source 1..21: mol_type = other RNA
  modified_base 1: mod_base = OTHER; note = 2'-O-methylguanosine-3'-phosphorothioate
  modified_base 2: mod_base = OTHER; note = 2'-O-methyladenosine-3'-phosphorothioate
  modified_base 3: mod_base = OTHER; note = 2'-O-methyladenosine-3'-phosphate
  modified_base 4: mod_base = OTHER; note = 2'-O-methylguanosine-3'-phosphate
  modified_base 5: mod_base = OTHER; note = 2'-O-methyladenosine-3'-phosphate
  modified_base 6: mod_base = OTHER; note = 2'-O-methylguanosine-3'-phosphate
  modified_base 7: mod_base = OTHER; note = 2'-deoxy-2'-fluoroadenosine-3'-phosphate
  modified_base 8: mod_base = OTHER; note = 2'-O-methylguanosine-3'-phosphate
  modified_base 9: mod_base = OTHER; note = 2'-deoxy-2'-fluoroguanosine-3'-phosphate
  modified_base 10: mod_base = OTHER; note = 2'-deoxy-2'-fluorocytidine-3'-phosphate
  modified_base 11: mod_base = OTHER; note = 2'-deoxy-2'-fluoroadenosine-3'-phosphate
  modified_base 12: mod_base = OTHER; note = 2'-O-methyluridine-3'-phosphate
  modified_base 13: mod_base = OTHER; note = 2'-O-methylguanosine-3'-phosphate
  modified_base 14: mod_base = OTHER; note = 2'-O-methyluridine-3'-phosphate
  modified_base 15: mod_base = OTHER; note = 2'-O-methyluridine-3'-phosphate
  modified_base 16: mod_base = OTHER; note = 2'-O-methylguanosine-3'-phosphate
  modified_base 17: mod_base = OTHER; note = 2'-O-methylguanosine-3'-phosphate
  modified_base 18: mod_base = OTHER; note = 2'-O-methyladenosine-3'-phosphate
  modified_base 19: mod_base = OTHER; note = 2'-O-methylguanosine-3'-phosphate
  modified_base 20: mod_base = OTHER; note = 2'-O-methyladenosine-3'-phosphate
  modified_base 21: mod_base = OTHER; note = 2'-O-methyluridine-3'-phosphate ((2S,4R)-1-[29-[[2-(acetylamino)-2-deoxy-beta-D-galactopyra nosyl]oxy]-14,14-bis[[3-[[3-[[5-[[2-(acetylamino)-2-deoxy-b eta-D-galactopyranosyl]oxy]-1-oxopentyl]amino]propyl]amino] -3-oxopropoxy]methyl]-1,12,19,25-tetraoxo-16-oxa-13,20,24-t riazanonacos-1-yl]-4-hydroxy-2-pyrrolidinyl)methyl ester
gaagagaggcatgttggagat

SEQ ID NO: 269 - RNA, 21 nt, synthetic construct
  source 1..21: mol_type = other RNA
  modified_base 1: mod_base = OTHER; note = 2'-O-methyluridine-3'-phosphorothioate
  modified_base 2: mod_base = OTHER; note = 2'-O-methyluridine-3'-phosphorothioate
  modified_base 3: mod_base = OTHER; note = 2'-O-methylguanosine-3'-phosphate
  modified_base 4: mod_base = OTHER; note = 2'-O-methylguanosine-3'-phosphate
  modified_base 5: mod_base = OTHER; note = 2'-O-methylguanosine-3'-phosphate
  modified_base 6: mod_base = OTHER; note = 2'-O-methylcytidine-3'-phosphate
  modified_base 7: mod_base = OTHER; note = 2'-deoxy-2'-fluoroadenosine-3'-phosphate
  modified_base 8: mod_base = OTHER; note = 2'-O-methyladenosine-3'-phosphate
  modified_base 9: mod_base = OTHER; note = 2'-deoxy-2'-fluoroadenosine-3'-phosphate
  modified_base 10: mod_base = OTHER; note = 2'-deoxy-2'-fluoroguanosine-3'-phosphate
  modified_base 11: mod_base = OTHER; note = 2'-deoxy-2'-fluoroguanosine-3'-phosphate
  modified_base 12: mod_base = OTHER; note = 2'-O-methyluridine-3'-phosphate
  modified_base 13: mod_base = OTHER; note = 2'-O-methylguanosine-3'-phosphate
  modified_base 14: mod_base = OTHER; note = 2'-O-methylguanosine-3'-phosphate
  modified_base 15: mod_base = OTHER; note = 2'-O-methyladenosine-3'-phosphate
  modified_base 16: mod_base = OTHER; note = 2'-O-methyladenosine-3'-phosphate
  modified_base 17: mod_base = OTHER; note = 2'-O-methyladenosine-3'-phosphate
  modified_base 18: mod_base = OTHER; note = 2'-O-methyluridine-3'-phosphate
  modified_base 19: mod_base = OTHER; note = 2'-O-methylguanosine-3'-phosphate
  modified_base 20: mod_base = OTHER; note = 2'-O-methyladenosine-3'-phosphate
  modified_base 21: mod_base = OTHER; note = 2'-O-methyladenosine-3'-phosphate ((2S,4R)-1-[29-[[2-(acetylamino)-2-deoxy-beta-D-galactopyra nosyl]oxy]-14,14-bis[[3-[[3-[[5-[[2-(acetylamino)-2-deoxy-b eta-D-galactopyranosyl]oxy]-1-oxopentyl]amino]propyl]amino] -3-oxopropoxy]methyl]-1,12,19,25-tetraoxo-16-oxa-13,20,24-t riazanonacos-1-yl]-4-hydroxy-2-pyrrolidinyl)methyl ester
ttgggcaaaggtggaaatgaa

SEQ ID NO: 270 - RNA, 21 nt, synthetic construct
  source 1..21: mol_type = other RNA
  modified_base 1: mod_base = OTHER; note = 2'-O-methyluridine-3'-phosphorothioate
  modified_base 2: mod_base = OTHER; note = 2'-O-methylcytidine-3'-phosphorothioate
  modified_base 3: mod_base = OTHER; note = 2'-O-methyladenosine-3'-phosphate
  modified_base 4: mod_base = OTHER; note = 2'-O-methyladenosine-3'-phosphate
  modified_base 5: mod_base = OTHER; note = 2'-O-methyluridine-3'-phosphate
  modified_base 6: mod_base = OTHER; note = 2'-O-methyluridine-3'-phosphate
  modified_base 7: mod_base = OTHER; note = 2'-deoxy-2'-fluorouridine-3'-phosphate
  modified_base 8: mod_base = OTHER; note = 2'-O-methylcytidine-3'-phosphate
  modified_base 9: mod_base = OTHER; note = 2'-deoxy-2'-fluoroguanosine-3'-phosphate
  modified_base 10: mod_base = OTHER; note = 2'-deoxy-2'-fluoroadenosine-3'-phosphate
  modified_base 11: mod_base = OTHER; note = 2'-deoxy-2'-fluoroguanosine-3'-phosphate
  modified_base 12: mod_base = OTHER; note = 2'-O-methylcytidine-3'-phosphate
  modified_base 13: mod_base = OTHER; note = 2'-O-methyladenosine-3'-phosphate
  modified_base 14: mod_base = OTHER; note = 2'-O-methylguanosine-3'-phosphate
  modified_base 15: mod_base = OTHER; note = 2'-O-methyladenosine-3'-phosphate
  modified_base 16: mod_base = OTHER; note = 2'-O-methyladenosine-3'-phosphate
  modified_base 17: mod_base = OTHER; note = 2'-O-methylguanosine-3'-phosphate
  modified_base 18: mod_base = OTHER; note = 2'-O-methylguanosine-3'-phosphate
  modified_base 19: mod_base = OTHER; note = 2'-O-methyladenosine-3'-phosphate
  modified_base 20: mod_base = OTHER; note = 2'-O-methyladenosine-3'-phosphate
  modified_base 21: mod_base = OTHER; note = 2'-O-methyladenosine-3'-phosphate ((2S,4R)-1-[29-[[2-(acetylamino)-2-deoxy-beta-D-galactopyra nosyl]oxy]-14,14-bis[[3-[[3-[[5-[[2-(acetylamino)-2-deoxy-b eta-D-galactopyranosyl]oxy]-1-oxopentyl]amino]propyl]amino] -3-oxopropoxy]methyl]-1,12,19,25-tetraoxo-16-oxa-13,20,24-t riazanonacos-1-yl]-4-hydroxy-2-pyrrolidinyl)methyl ester
tcaatttcgagcagaaggaaa

SEQ ID NO: 271 - RNA, 21 nt, synthetic construct
  source 1..21: mol_type = other RNA
  modified_base 1: mod_base = OTHER; note = 2'-O-methylcytidine-3'-phosphorothioate
  modified_base 2: mod_base = OTHER; note = 2'-O-methyladenosine-3'-phosphorothioate
  modified_base 3: mod_base = OTHER; note = 2'-O-methyluridine-3'-phosphate
  modified_base 4: mod_base = OTHER; note = 2'-O-methylguanosine-3'-phosphate
  modified_base 5: mod_base = OTHER; note = 2'-O-methyladenosine-3'-phosphate
  modified_base 6: mod_base = OTHER; note = 2'-O-methyladenosine-3'-phosphate
  modified_base 7: mod_base = OTHER; note = 2'-deoxy-2'-fluoroadenosine-3'-phosphate
  modified_base 8: mod_base = OTHER; note = 2'-O-methyladenosine-3'-phosphate
  modified_base 9: mod_base = OTHER; note = 2'-deoxy-2'-fluoroadenosine-3'-phosphate
  modified_base 10: mod_base = OTHER; note = 2'-deoxy-2'-fluoroguanosine-3'-phosphate
  modified_base 11: mod_base = OTHER; note = 2'-deoxy-2'-fluorocytidine-3'-phosphate
  modified_base 12: mod_base = OTHER; note = 2'-O-methyladenosine-3'-phosphate
  modified_base 13: mod_base = OTHER; note = 2'-O-methylguanosine-3'-phosphate
  modified_base 14: mod_base = OTHER; note = 2'-O-methyladenosine-3'-phosphate
  modified_base 15: mod_base = OTHER; note = 2'-O-methyluridine-3'-phosphate
  modified_base 16: mod_base = OTHER; note = 2'-O-methylguanosine-3'-phosphate
  modified_base 17: mod_base = OTHER; note = 2'-O-methyladenosine-3'-phosphate
  modified_base 18: mod_base = OTHER; note = 2'-O-methylcytidine-3'-phosphate
  modified_base 19: mod_base = OTHER; note = 2'-O-methyluridine-3'-phosphate
  modified_base 20: mod_base = OTHER; note = 2'-O-methyluridine-3'-phosphate
  modified_base 21: mod_base = OTHER; note = 2'-O-methyluridine-3'-phosphate ((2S,4R)-1-[29-[[2-(acetylamino)-2-deoxy-beta-D-galactopyra nosyl]oxy]-14,14-bis[[3-[[3-[[5-[[2-(acetylamino)-2-deoxy-b eta-D-galactopyranosyl]oxy]-1-oxopentyl]amino]propyl]amino] -3-oxopropoxy]methyl]-1,12,19,25-tetraoxo-16-oxa-13,20,24-t riazanonacos-1-yl]-4-hydroxy-2-pyrrolidinyl)methyl ester
catgaaaaagcagatgacttt

SEQ ID NO: 272 - RNA, 21 nt, synthetic construct
  source 1..21: mol_type = other RNA
  modified_base 1: mod_base = OTHER; note = 2'-O-methyluridine-3'-phosphorothioate
  modified_base 2: mod_base = OTHER; note = 2'-O-methylguanosine-3'-phosphorothioate
  modified_base 3: mod_base = OTHER; note = 2'-O-methylguanosine-3'-phosphate
  modified_base 4: mod_base = OTHER; note = 2'-O-methyladenosine-3'-phosphate
  modified_base 5: mod_base = OTHER; note = 2'-O-methyluridine-3'-phosphate
  modified_base 6: mod_base = OTHER; note = 2'-O-methyluridine-3'-phosphate
  modified_base 7: mod_base = OTHER; note = 2'-deoxy-2'-fluorocytidine-3'-phosphate
  modified_base 8: mod_base = OTHER; note = 2'-O-methylcytidine-3'-phosphate
  modified_base 9: mod_base = OTHER; note = 2'-deoxy-2'-fluoroadenosine-3'-phosphate
  modified_base 10: mod_base = OTHER; note = 2'-deoxy-2'-fluorouridine-3'-phosphate
  modified_base 11: mod_base = OTHER; note = 2'-deoxy-2'-fluoroguanosine-3'-phosphate
  modified_base 12: mod_base = OTHER; note = 2'-O-methyluridine-3'-phosphate
  modified_base 13: mod_base = OTHER; note = 2'-O-methyluridine-3'-phosphate
  modified_base 14: mod_base = OTHER; note = 2'-O-methylcytidine-3'-phosphate
  modified_base 15: mod_base = OTHER; note = 2'-O-methyladenosine-3'-phosphate
  modified_base 16: mod_base = OTHER; note = 2'-O-methyluridine-3'-phosphate
  modified_base 17: mod_base = OTHER; note = 2'-O-methylcytidine-3'-phosphate
  modified_base 18: mod_base = OTHER; note = 2'-O-methyladenosine-3'-phosphate
  modified_base 19: mod_base = OTHER; note = 2'-O-methylguanosine-3'-phosphate
  modified_base 20: mod_base = OTHER; note = 2'-O-methyluridine-3'-phosphate
  modified_base 21: mod_base = OTHER; note = 2'-O-methyluridine-3'-phosphate ((2S,4R)-1-[29-[[2-(acetylamino)-2-deoxy-beta-D-galactopyra nosyl]oxy]-14,14-bis[[3-[[3-[[5-[[2-(acetylamino)-2-deoxy-b eta-D-galactopyranosyl]oxy]-1-oxopentyl]amino]propyl]amino] -3-oxopropoxy]methyl]-1,12,19,25-tetraoxo-16-oxa-13,20,24-t riazanonacos-1-yl]-4-hydroxy-2-pyrrolidinyl)methyl ester
tggattccatgttcatcagtt

SEQ ID NO: 273 - RNA, 21 nt, synthetic construct
  source 1..21: mol_type = other RNA
  modified_base 1: mod_base = OTHER; note = 2'-O-methylguanosine-3'-phosphorothioate
  modified_base 2: mod_base = OTHER; note = 2'-O-methyladenosine-3'-phosphorothioate
  modified_base 3: mod_base = OTHER; note = 2'-O-methylguanosine-3'-phosphate
  modified_base 4: mod_base = OTHER; note = 2'-O-methyladenosine-3'-phosphate
  modified_base 5: mod_base = OTHER; note = 2'-O-methylguanosine-3'-phosphate
  modified_base 6: mod_base = OTHER; note = 2'-O-methylguanosine-3'-phosphate
  modified_base 7: mod_base = OTHER; note = 2'-deoxy-2'-fluorocytidine-3'-phosphate
  modified_base 8: mod_base = OTHER; note = 2'-O-methyladenosine-3'-phosphate
  modified_base 9: mod_base = OTHER; note = 2'-deoxy-2'-fluorouridine-3'-phosphate
  modified_base 10: mod_base = OTHER; note = 2'-deoxy-2'-fluoroguanosine-3'-phosphate
  modified_base 11: mod_base = OTHER; note = 2'-deoxy-2'-fluorouridine-3'-phosphate
  modified_base 12: mod_base = OTHER; note = 2'-O-methyluridine-3'-phosphate
  modified_base 13: mod_base = OTHER; note = 2'-O-methylguanosine-3'-phosphate
  modified_base 14: mod_base = OTHER; note = 2'-O-methylguanosine-3'-phosphate
  modified_base 15: mod_base = OTHER; note = 2'-O-methyladenosine-3'-phosphate
  modified_base 16: mod_base = OTHER; note = 2'-O-methylguanosine-3'-phosphate
  modified_base 17: mod_base = OTHER; note = 2'-O-methyladenosine-3'-phosphate
  modified_base 18: mod_base = OTHER; note = 2'-O-methylcytidine-3'-phosphate
  modified_base 19: mod_base = OTHER; note = 2'-O-methylcytidine-3'-phosphate
  modified_base 20: mod_base = OTHER; note = 2'-O-methyluridine-3'-phosphate
  modified_base 21: mod_base = OTHER; note = 2'-O-methyluridine-3'-phosphate ((2S,4R)-1-[29-[[2-(acetylamino)-2-deoxy-beta-D-galactopyra nosyl]oxy]-14,14-bis[[3-[[3-[[5-[[2-(acetylamino)-2-deoxy-b eta-D-galactopyranosyl]oxy]-1-oxopentyl]amino]propyl]amino] -3-oxopropoxy]methyl]-1,12,19,25-tetraoxo-16-oxa-13,20,24-t riazanonacos-1-yl]-4-hydroxy-2-pyrrolidinyl)methyl ester
gagaggcatgttggagacctt

SEQ ID NO: 274 - RNA, 21 nt, synthetic construct
  source 1..21: mol_type = other RNA
  modified_base 1: mod_base = OTHER; note = 2'-O-methylguanosine-3'-phosphorothioate
  modified_base 2: mod_base = OTHER; note = 2'-O-methyladenosine-3'-phosphorothioate
  modified_base 3: mod_base = OTHER; note = 2'-O-methyladenosine-3'-phosphate
  modified_base 4: mod_base = OTHER; note = 2'-O-methylguanosine-3'-phosphate
  modified_base 5: mod_base = OTHER; note = 2'-O-methyladenosine-3'-phosphate
  modified_base 6: mod_base = OTHER; note = 2'-O-methyluridine-3'-phosphate
  modified_base 7: mod_base = OTHER; note = 2'-deoxy-2'-fluorouridine-3'-phosphate
  modified_base 8: mod_base = OTHER; note = 2'-O-methylcytidine-3'-phosphate
  modified_base 9: mod_base = OTHER; note = 2'-deoxy-2'-fluorouridine-3'-phosphate
  modified_base 10: mod_base = OTHER; note = 2'-deoxy-2'-fluoroguanosine-3'-phosphate
  modified_base 11: mod_base = OTHER; note = 2'-deoxy-2'-fluorouridine-3'-phosphate
  modified_base 12: mod_base = OTHER; note = 2'-O-methylguanosine-3'-phosphate
  modified_base 13: mod_base = OTHER; note = 2'-O-methyladenosine-3'-phosphate
  modified_base 14: mod_base = OTHER; note = 2'-O-methyluridine-3'-phosphate
  modified_base 15: mod_base = OTHER; note = 2'-O-methylcytidine-3'-phosphate
  modified_base 16: mod_base = OTHER; note = 2'-O-methyluridine-3'-phosphate
  modified_base 17: mod_base = OTHER; note = 2'-O-methylcytidine-3'-phosphate
  modified_base 18: mod_base = OTHER; note = 2'-O-methylguanosine-3'-phosphate
  modified_base 19: mod_base = OTHER; note = 2'-O-methylcytidine-3'-phosphate
  modified_base 20: mod_base = OTHER; note = 2'-O-methyluridine-3'-phosphate
  modified_base 21: mod_base = OTHER; note = 2'-O-methyluridine-3'-phosphate ((2S,4R)-1-[29-[[2-(acetylamino)-2-deoxy-beta-D-galactopyra nosyl]oxy]-14,14-bis[[3-[[3-[[5-[[2-(acetylamino)-2-deoxy-b eta-D-galactopyranosyl]oxy]-1-oxopentyl]amino]propyl]amino] -3-oxopropoxy]methyl]-1,12,19,25-tetraoxo-16-oxa-13,20,24-t riazanonacos-1-yl]-4-hydroxy-2-pyrrolidinyl)methyl ester
gaagattctgtgatctcgctt

SEQ ID NO: 275 - RNA, 21 nt, synthetic construct
  source 1..21: mol_type = other RNA
  modified_base 1: mod_base = OTHER; note = 2'-O-methyluridine-3'-phosphorothioate
  modified_base 2: mod_base = OTHER; note = 2'-O-methylcytidine-3'-phosphorothioate
  modified_base 3: mod_base = OTHER; note = 2'-O-methyladenosine-3'-phosphate
  modified_base 4: mod_base = OTHER; note = 2'-O-methylguanosine-3'-phosphate
  modified_base 5: mod_base = OTHER; note = 2'-O-methyluridine-3'-phosphate
  modified_base 6: mod_base = OTHER; note = 2'-O-methyluridine-3'-phosphate
  modified_base 7: mod_base = OTHER; note = 2'-deoxy-2'-fluorouridine-3'-phosphate
  modified_base 8: mod_base = OTHER; note = 2'-O-methylguanosine-3'-phosphate
  modified_base 9: mod_base = OTHER; note = 2'-deoxy-2'-fluoroguanosine-3'-phosphate
  modified_base 10: mod_base = OTHER; note = 2'-deoxy-2'-fluoroadenosine-3'-phosphate
  modified_base 11: mod_base = OTHER; note = 2'-deoxy-2'-fluoroguanosine-3'-phosphate
  modified_base 12: mod_base = OTHER; note = 2'-O-methyladenosine-3'-phosphate
  modified_base 13: mod_base = OTHER; note = 2'-O-methyluridine-3'-phosphate
  modified_base 14: mod_base = OTHER; note = 2'-O-methyladenosine-3'-phosphate
  modified_base 15: mod_base = OTHER; note = 2'-O-methyladenosine-3'-phosphate
  modified_base 16: mod_base = OTHER; note = 2'-O-methyluridine-3'-phosphate
  modified_base 17: mod_base = OTHER; note = 2'-O-methyladenosine-3'-phosphate
  modified_base 18: mod_base = OTHER; note = 2'-O-methylcytidine-3'-phosphate
  modified_base 19: mod_base = OTHER; note = 2'-O-methyladenosine-3'-phosphate
  modified_base 20: mod_base = OTHER; note = 2'-O-methylcytidine-3'-phosphate
  modified_base 21: mod_base = OTHER; note = 2'-O-methyladenosine-3'-phosphate ((2S,4R)-1-[29-[[2-(acetylamino)-2-deoxy-beta-D-galactopyra nosyl]oxy]-14,14-bis[[3-[[3-[[5-[[2-(acetylamino)-2-deoxy-b eta-D-galactopyranosyl]oxy]-1-oxopentyl]amino]propyl]amino] -3-oxopropoxy]methyl]-1,12,19,25-tetraoxo-16-oxa-13,20,24-t riazanonacos-1-yl]-4-hydroxy-2-pyrrolidinyl)methyl ester
tcagtttggagataatacaca

SEQ ID NO: 276 - RNA, 21 nt, synthetic construct
  source 1..21: mol_type = other RNA
  modified_base 1: mod_base = OTHER; note = 2'-O-methylcytidine-3'-phosphorothioate
  modified_base 2: mod_base = OTHER; note = 2'-O-methyladenosine-3'-phosphorothioate
  modified_base 3: mod_base = OTHER; note = 2'-O-methyladenosine-3'-phosphate
  modified_base 4: mod_base = OTHER; note = 2'-O-methylguanosine-3'-phosphate
  modified_base 5: mod_base = OTHER; note = 2'-O-methylguanosine-3'-phosphate
  modified_base 6: mod_base = OTHER; note = 2'-O-methyluridine-3'-phosphate
  modified_base 7: mod_base = OTHER; note = 2'-deoxy-2'-fluoroguanosine-3'-phosphate
  modified_base 8: mod_base = OTHER; note = 2'-O-methyluridine-3'-phosphate
  modified_base 9: mod_base = OTHER; note = 2'-deoxy-2'-fluorocytidine-3'-phosphate
  modified_base 10: mod_base = OTHER; note = 2'-deoxy-2'-fluorouridine-3'-phosphate
  modified_base 11: mod_base = OTHER; note = 2'-deoxy-2'-fluorouridine-3'-phosphate
  modified_base 12: mod_base = OTHER; note = 2'-O-methyluridine-3'-phosphate
  modified_base 13: mod_base = OTHER; note = 2'-O-methylcytidine-3'-phosphate
  modified_base 14: mod_base = OTHER; note = 2'-O-methylguanosine-3'-phosphate
  modified_base 15: mod_base = OTHER; note = 2'-O-methyladenosine-3'-phosphate
  modified_base 16: mod_base = OTHER; note = 2'-O-methyladenosine-3'-phosphate
  modified_base 17: mod_base = OTHER; note = 2'-O-methylguanosine-3'-phosphate
  modified_base 18: mod_base = OTHER; note = 2'-O-methyladenosine-3'-phosphate
  modified_base 19: mod_base = OTHER; note = 2'-O-methyluridine-3'-phosphate
  modified_base 20: mod_base = OTHER; note = 2'-O-methyluridine-3'-phosphate
  modified_base 21: mod_base = OTHER; note = 2'-O-methyluridine-3'-phosphate ((2S,4R)-1-[29-[[2-(acetylamino)-2-deoxy-beta-D-galactopyra nosyl]oxy]-14,14-bis[[3-[[3-[[5-[[2-(acetylamino)-2-deoxy-b eta-D-galactopyranosyl]oxy]-1-oxopentyl]amino]propyl]amino] -3-oxopropoxy]methyl]-1,12,19,25-tetraoxo-16-oxa-13,20,24-t riazanonacos-1-yl]-4-hydroxy-2-pyrrolidinyl)methyl ester
caaggtgtctttcgaagattt

SEQ ID NO: 277 - RNA, 21 nt, synthetic construct
  source 1..21: mol_type = other RNA
  modified_base 1: mod_base = OTHER; note = 2'-O-methyladenosine-3'-phosphorothioate
  modified_base 2: mod_base = OTHER; note = 2'-O-methyluridine-3'-phosphorothioate
  modified_base 3: mod_base = OTHER; note = 2'-O-methylguanosine-3'-phosphate
  modified_base 4: mod_base = OTHER; note = 2'-O-methyluridine-3'-phosphate
  modified_base 5: mod_base = OTHER; note = 2'-O-methyluridine-3'-phosphate
  modified_base 6: mod_base = OTHER; note = 2'-O-methylcytidine-3'-phosphate
  modified_base 7: mod_base = OTHER; note = 2'-deoxy-2'-fluoroadenosine-3'-phosphate
  modified_base 8: mod_base = OTHER; note = 2'-O-methyluridine-3'-phosphate
  modified_base 9: mod_base = OTHER; note = 2'-deoxy-2'-fluorocytidine-3'-phosphate
  modified_base 10: mod_base = OTHER; note = 2'-deoxy-2'-fluoroadenosine-3'-phosphate
  modified_base 11: mod_base = OTHER; note = 2'-deoxy-2'-fluoroguanosine-3'-phosphate
  modified_base 12: mod_base = OTHER; note = 2'-O-methyluridine-3'-phosphate
  modified_base 13: mod_base = OTHER; note = 2'-O-methyluridine-3'-phosphate
  modified_base 14: mod_base = OTHER; note = 2'-O-methyluridine-3'-phosphate
  modified_base 15: mod_base = OTHER; note = 2'-O-methylguanosine-3'-phosphate
  modified_base 16: mod_base = OTHER; note = 2'-O-methylguanosine-3'-phosphate
  modified_base 17: mod_base = OTHER; note = 2'-O-methyladenosine-3'-phosphate
  modified_base 18: mod_base = OTHER; note = 2'-O-methylguanosine-3'-phosphate
  modified_base 19: mod_base = OTHER; note = 2'-O-methyladenosine-3'-phosphate
  modified_base 20: mod_base = OTHER; note = 2'-O-methyluridine-3'-phosphate
  modified_base 21: mod_base = OTHER; note = 2'-O-methyladenosine-3'-phosphate ((2S,4R)-1-[29-[[2-(acetylamino)-2-deoxy-beta-D-galactopyra nosyl]oxy]-14,14-bis[[3-[[3-[[5-[[2-(acetylamino)-2-deoxy-b eta-D-galactopyranosyl]oxy]-1-oxopentyl]amino]propyl]amino] -3-oxopropoxy]methyl]-1,12,19,25-tetraoxo-16-oxa-13,20,24-t riazanonacos-1-yl]-4-hydroxy-2-pyrrolidinyl)methyl ester
atgttcatcagtttggagata

SEQ ID NO: 278 - RNA, 21 nt, synthetic construct
  source 1..21: mol_type = other RNA
  modified_base 1: mod_base = OTHER; note = 2'-O-methyladenosine-3'-phosphorothioate
  modified_base 2: mod_base = OTHER; note = 2'-O-methylcytidine-3'-phosphorothioate
  modified_base 3: mod_base = OTHER; note = 2'-O-methylcytidine-3'-phosphate
  modified_base 4: mod_base = OTHER; note = 2'-O-methyladenosine-3'-phosphate
  modified_base 5: mod_base = OTHER; note = 2'-O-methyluridine-3'-phosphate
  modified_base 6: mod_base = OTHER; note = 2'-O-methylcytidine-3'-phosphate
  modified_base 7: mod_base = OTHER; note = 2'-deoxy-2'-fluoroadenosine-3'-phosphate
  modified_base 8: mod_base = OTHER; note = 2'-O-methyladenosine-3'-phosphate
  modified_base 9: mod_base = OTHER; note = 2'-deoxy-2'-fluorouridine-3'-phosphate
  modified_base 10: mod_base = OTHER; note = 2'-deoxy-2'-fluorouridine-3'-phosphate
  modified_base 11: mod_base = OTHER; note = 2'-deoxy-2'-fluorouridine-3'-phosphate
  modified_base 12: mod_base = OTHER; note = 2'-O-methylcytidine-3'-phosphate
  modified_base 13: mod_base = OTHER; note = 2'-O-methylguanosine-3'-phosphate
  modified_base 14: mod_base = OTHER; note = 2'-O-methyladenosine-3'-phosphate
  modified_base 15: mod_base = OTHER; note = 2'-O-methylguanosine-3'-phosphate
  modified_base 16: mod_base = OTHER; note = 2'-O-methylcytidine-3'-phosphate
  modified_base 17: mod_base = OTHER; note = 2'-O-methyladenosine-3'-phosphate
  modified_base 18: mod_base = OTHER; note = 2'-O-methylguanosine-3'-phosphate
  modified_base 19: mod_base = OTHER; note = 2'-O-methyladenosine-3'-phosphate
  modified_base 20: mod_base = OTHER; note = 2'-O-methyladenosine-3'-phosphate
  modified_base 21: mod_base = OTHER; note = 2'-O-methyluridine-3'-phosphate ((2S,4R)-1-[29-[[2-(acetylamino)-2-deoxy-beta-D-galactopyra nosyl]oxy]-14,14-bis[[3-[[3-[[5-[[2-(acetylamino)-2-deoxy-b eta-D-galactopyranosyl]oxy]-1-oxopentyl]amino]propyl]amino] -3-oxopropoxy]methyl]-1,12,19,25-tetraoxo-16-oxa-13,20,24-t riazanonacos-1-yl]-4-hydroxy-2-pyrrolidinyl)methyl ester
accatcaatttcgagcagaat

SEQ ID NO: 279 - RNA, 21 nt, synthetic construct
  source 1..21: mol_type = other RNA
  modified_base 1: mod_base = OTHER; note = 2'-O-methyladenosine-3'-phosphorothioate
  modified_base 2: mod_base = OTHER; note = 2'-O-methyluridine-3'-phosphorothioate
  modified_base 3: mod_base = OTHER; note = 2'-O-methylguanosine-3'-phosphate
  modified_base 4: mod_base = OTHER; note = 2'-O-methyluridine-3'-phosphate
  modified_base 5: mod_base = OTHER; note = 2'-O-methylguanosine-3'-phosphate
  modified_base 6: mod_base = OTHER; note = 2'-O-methyladenosine-3'-phosphate
  modified_base 7: mod_base = OTHER; note = 2'-deoxy-2'-fluorocytidine-3'-phosphate
  modified_base 8: mod_base = OTHER; note = 2'-O-methyluridine-3'-phosphate
  modified_base 9: mod_base = OTHER; note = 2'-deoxy-2'-fluoroguanosine-3'-phosphate
  modified_base 10: mod_base = OTHER; note = 2'-deoxy-2'-fluorocytidine-3'-phosphate
  modified_base 11: mod_base = OTHER; note = 2'-deoxy-2'-fluorouridine-3'-phosphate
  modified_base 12: mod_base = OTHER; note = 2'-O-methylguanosine-3'-phosphate
  modified_base 13: mod_base = OTHER; note = 2'-O-methylguanosine-3'-phosphate
  modified_base 14: mod_base = OTHER; note = 2'-O-methylcytidine-3'-phosphate
  modified_base 15: mod_base = OTHER; note = 2'-O-methyladenosine-3'-phosphate
  modified_base 16: mod_base = OTHER; note = 2'-O-methyladenosine-3'-phosphate
  modified_base 17: mod_base = OTHER; note = 2'-O-methyladenosine-3'-phosphate
  modified_base 18: mod_base = OTHER; note = 2'-O-methylguanosine-3'-phosphate
  modified_base 19: mod_base = OTHER; note = 2'-O-methyladenosine-3'-phosphate
  modified_base 20: mod_base = OTHER; note = 2'-O-methyluridine-3'-phosphate
  modified_base 21: mod_base = OTHER; note = 2'-O-methyluridine-3'-phosphate ((2S,4R)-1-[29-[[2-(acetylamino)-2-deoxy-beta-D-galactopyra nosyl]oxy]-14,14-bis[[3-[[3-[[5-[[2-(acetylamino)-2-deoxy-b eta-D-galactopyranosyl]oxy]-1-oxopentyl]amino]propyl]amino] -3-oxopropoxy]methyl]-1,12,19,25-tetraoxo-16-oxa-13,20,24-t riazanonacos-1-yl]-4-hydroxy-2-pyrrolidinyl)methyl ester
atgtgactgctggcaaagatt

SEQ ID NO: 280 - RNA, 21 nt, synthetic construct
  source 1..21: mol_type = other RNA
  modified_base 1: mod_base = OTHER; note = 2'-O-methylguanosine-3'-phosphorothioate
  modified_base 2: mod_base = OTHER; note = 2'-O-methylguanosine-3'-phosphorothioate
  modified_base 3: mod_base = OTHER; note = 2'-O-methyluridine-3'-phosphate
  modified_base 4: mod_base = OTHER; note = 2'-O-methylguanosine-3'-phosphate
  modified_base 5: mod_base = OTHER; note = 2'-O-methylguanosine-3'-phosphate
  modified_base 6: mod_base = OTHER; note = 2'-O-methyladenosine-3'-phosphate
  modified_base 7: mod_base = OTHER; note = 2'-deoxy-2'-fluoroadenosine-3'-phosphate
  modified_base 8: mod_base = OTHER; note = 2'-O-methyladenosine-3'-phosphate
  modified_base 9: mod_base = OTHER; note = 2'-deoxy-2'-fluorouridine-3'-phosphate
  modified_base 10: mod_base = OTHER; note = 2'-deoxy-2'-fluoroguanosine-3'-phosphate
  modified_base 11: mod_base = OTHER; note = 2'-deoxy-2'-fluoroadenosine-3'-phosphate
  modified_base 12: mod_base = OTHER; note = 2'-O-methyladenosine-3'-phosphate
  modified_base 13: mod_base = OTHER; note = 2'-O-methylguanosine-3'-phosphate
  modified_base 14: mod_base = OTHER; note = 2'-O-methyladenosine-3'-phosphate
  modified_base 15: mod_base = OTHER; note = 2'-O-methyladenosine-3'-phosphate
  modified_base 16: mod_base = OTHER; note = 2'-O-methyladenosine-3'-phosphate
  modified_base 17: mod_base = OTHER; note = 2'-O-methylguanosine-3'-phosphate
  modified_base 18: mod_base = OTHER; note = 2'-O-methyluridine-3'-phosphate
  modified_base 19: mod_base = OTHER; note = 2'-O-methyladenosine-3'-phosphate
  modified_base 20: mod_base = OTHER; note = 2'-O-methyladenosine-3'-phosphate
  modified_base 21: mod_base = OTHER; note = 2'-O-methyladenosine-3'-phosphate ((2S,4R)-1-[29-[[2-(acetylamino)-2-deoxy-beta-D-galactopyra nosyl]oxy]-14,14-bis[[3-[[3-[[5-[[2-(acetylamino)-2-deoxy-b eta-D-galactopyranosyl]oxy]-1-oxopentyl]amino]propyl]amino] -3-oxopropoxy]methyl]-1,12,19,25-tetraoxo-16-oxa-13,20,24-t riazanonacos-1-yl]-4-hydroxy-2-pyrrolidinyl)methyl ester
ggtggaaatgaagaaagtaaa

SEQ ID NO: 281 - RNA, 21 nt, synthetic construct
  source 1..21: mol_type = other RNA
  modified_base 1: mod_base = OTHER; note = 2'-O-methylguanosine-3'-phosphorothioate
  modified_base 2: mod_base = OTHER; note = 2'-O-methylguanosine-3'-phosphorothioate
  modified_base 3: mod_base = OTHER; note = 2'-O-methyladenosine-3'-phosphate
  modified_base 4: mod_base = OTHER; note = 2'-O-methyluridine-3'-phosphate
  modified_base 5: mod_base = OTHER; note = 2'-O-methyluridine-3'-phosphate
  modified_base 6: mod_base = OTHER; note = 2'-O-methylcytidine-3'-phosphate
  modified_base 7: mod_base = OTHER; note = 2'-deoxy-2'-fluorocytidine-3'-phosphate
  modified_base 8: mod_base = OTHER; note = 2'-O-methyladenosine-3'-phosphate
  modified_base 9: mod_base = OTHER; note = 2'-deoxy-2'-fluorouridine-3'-phosphate
  modified_base 10: mod_base = OTHER; note = 2'-deoxy-2'-fluoroguanosine-3'-phosphate
  modified_base 11: mod_base = OTHER; note = 2'-deoxy-2'-fluorouridine-3'-phosphate
  modified_base 12: mod_base = OTHER; note = 2'-O-methyluridine-3'-phosphate
  modified_base 13: mod_base = OTHER; note = 2'-O-methylcytidine-3'-phosphate
  modified_base 14: mod_base = OTHER; note = 2'-O-methyladenosine-3'-phosphate
  modified_base 15: mod_base = OTHER; note = 2'-O-methyluridine-3'-phosphate
  modified_base 16: mod_base = OTHER; note = 2'-O-methylcytidine-3'-phosphate
  modified_base 17: mod_base = OTHER; note = 2'-O-methyladenosine-3'-phosphate
  modified_base 18: mod_base = OTHER; note = 2'-O-methylguanosine-3'-phosphate
  modified_base 19: mod_base = OTHER; note = 2'-O-methyluridine-3'-phosphate
  modified_base 20: mod_base = OTHER; note = 2'-O-methyluridine-3'-phosphate
  modified_base 21: mod_base = OTHER; note = 2'-O-methyluridine-3'-phosphate ((2S,4R)-1-[29-[[2-(acetylamino)-2-deoxy-beta-D-galactopyra nosyl]oxy]-14,14-bis[[3-[[3-[[5-[[2-(acetylamino)-2-deoxy-b eta-D-galactopyranosyl]oxy]-1-oxopentyl]amino]propyl]amino] -3-oxopropoxy]methyl]-1,12,19,25-tetraoxo-16-oxa-13,20,24-t riazanonacos-1-yl]-4-hydroxy-2-pyrrolidinyl)methyl ester
ggattccatgttcatcagttt

SEQ ID NO: 282 - RNA, 21 nt, synthetic construct
  source 1..21: mol_type = other RNA
  modified_base 1: mod_base = OTHER; note = 2'-O-methyladenosine-3'-phosphorothioate
  modified_base 2: mod_base = OTHER; note = 2'-O-methyladenosine-3'-phosphorothioate
  modified_base 3: mod_base = OTHER; note = 2'-O-methyluridine-3'-phosphate
  modified_base 4: mod_base = OTHER; note = 2'-O-methylguanosine-3'-phosphate
  modified_base 5: mod_base = OTHER; note = 2'-O-methyluridine-3'-phosphate
  modified_base 6: mod_base = OTHER; note = 2'-O-methylguanosine-3'-phosphate
  modified_base 7: mod_base = OTHER; note = 2'-deoxy-2'-fluoroadenosine-3'-phosphate
  modified_base 8: mod_base = OTHER; note = 2'-O-methylcytidine-3'-phosphate
  modified_base 9: mod_base = OTHER; note = 2'-deoxy-2'-fluorouridine-3'-phosphate
  modified_base 10: mod_base = OTHER; note = 2'-deoxy-2'-fluoroguanosine-3'-phosphate
  modified_base 11: mod_base = OTHER; note = 2'-deoxy-2'-fluorocytidine-3'-phosphate
  modified_base 12: mod_base = OTHER; note = 2'-O-methyluridine-3'-phosphate
  modified_base 13: mod_base = OTHER; note = 2'-O-methylguanosine-3'-phosphate
  modified_base 14: mod_base = OTHER; note = 2'-O-methylguanosine-3'-phosphate
  modified_base 15: mod_base = OTHER; note = 2'-O-methylcytidine-3'-phosphate
  modified_base 16: mod_base = OTHER; note = 2'-O-methyladenosine-3'-phosphate
  modified_base 17: mod_base = OTHER; note = 2'-O-methyladenosine-3'-phosphate
  modified_base 18: mod_base = OTHER; note = 2'-O-methyladenosine-3'-phosphate
  modified_base 19: mod_base = OTHER; note = 2'-O-methylguanosine-3'-phosphate
  modified_base 20: mod_base = OTHER; note = 2'-O-methyladenosine-3'-phosphate
  modified_base 21: mod_base = OTHER; note = 2'-O-methyluridine-3'-phosphate ((2S,4R)-1-[29-[[2-(acetylamino)-2-deoxy-beta-D-galactopyra nosyl]oxy]-14,14-bis[[3-[[3-[[5-[[2-(acetylamino)-2-deoxy-b eta-D-galactopyranosyl]oxy]-1-oxopentyl]amino]propyl]amino] -3-oxopropoxy]methyl]-1,12,19,25-tetraoxo-16-oxa-13,20,24-t riazanonacos-1-yl]-4-hydroxy-2-pyrrolidinyl)methyl ester
aatgtgactgctggcaaagat

SEQ ID NO: 283 - RNA, 21 nt, synthetic construct
  source 1..21: mol_type = other RNA
  modified_base 1: mod_base = OTHER; note = 2'-O-methylguanosine-3'-phosphorothioate
  modified_base 2: mod_base = OTHER; note = 2'-O-methyluridine-3'-phosphorothioate
  modified_base 3: mod_base = OTHER; note = 2'-O-methylcytidine-3'-phosphate
  modified_base 4: mod_base = OTHER; note = 2'-O-methylcytidine-3'-phosphate
  modified_base 5: mod_base = OTHER; note = 2'-O-methyladenosine-3'-phosphate
  modified_base 6: mod_base = OTHER; note = 2'-O-methyluridine-3'-phosphate
  modified_base 7: mod_base = OTHER; note = 2'-deoxy-2'-fluoroguanosine-3'-phosphate
  modified_base 8: mod_base = OTHER; note = 2'-O-methyladenosine-3'-phosphate
  modified_base 9: mod_base = OTHER; note = 2'-deoxy-2'-fluoroadenosine-3'-phosphate
  modified_base 10: mod_base = OTHER; note = 2'-deoxy-2'-fluoroadenosine-3'-phosphate
  modified_base 11: mod_base = OTHER; note = 2'-deoxy-2'-fluoroadenosine-3'-phosphate
  modified_base 12: mod_base = OTHER; note = 2'-O-methyladenosine-3'-phosphate
  modified_base 13: mod_base = OTHER; note = 2'-O-methylguanosine-3'-phosphate
  modified_base 14: mod_base = OTHER; note = 2'-O-methylcytidine-3'-phosphate
  modified_base 15: mod_base = OTHER; note = 2'-O-methyladenosine-3'-phosphate
  modified_base 16: mod_base = OTHER; note = 2'-O-methylguanosine-3'-phosphate
  modified_base 17: mod_base = OTHER; note = 2'-O-methyladenosine-3'-phosphate
  modified_base 18: mod_base = OTHER; note = 2'-O-methyluridine-3'-phosphate
  modified_base 19: mod_base = OTHER; note = 2'-O-methylguanosine-3'-phosphate
  modified_base 20: mod_base = OTHER; note = 2'-O-methyladenosine-3'-phosphate
  modified_base 21: mod_base = OTHER; note = 2'-O-methyluridine-3'-phosphate ((2S,4R)-1-[29-[[2-(acetylamino)-2-deoxy-beta-D-galactopyra nosyl]oxy]-14,14-bis[[3-[[3-[[5-[[2-(acetylamino)-2-deoxy-b eta-D-galactopyranosyl]oxy]-1-oxopentyl]amino]propyl]amino] -3-oxopropoxy]methyl]-1,12,19,25-tetraoxo-16-oxa-13,20,24-t riazanonacos-1-yl]-4-hydroxy-2-pyrrolidinyl)methyl ester
gtccatgaaaaagcagatgat

SEQ ID NO: 284 - RNA, 23 nt, synthetic construct
  source 1..23: mol_type = other RNA
  modified_base 1: mod_base = OTHER; note = 2'-O-methyladenosine-3'-phosphorothioate
  modified_base 2: mod_base = OTHER; note = 2'-deoxy-2'-fluorouridine-3'-phosphorothioate
  modified_base 3: mod_base = OTHER; note = 2'-O-methylguanosine-3'-phosphate
  modified_base 4: mod_base = OTHER; note = 2'-O-methyluridine-3'-phosphate
  modified_base 5: mod_base = OTHER; note = 2'-O-methyladenosine-3'-phosphate
  modified_base 6: mod_base = OTHER; note = 2'-deoxy-2'-fluorouridine-3'-phosphate
  modified_base 7: mod_base = OTHER; note = 2'-O-methyluridine-3'-phosphate
  modified_base 8: mod_base = OTHER; note = 2'-deoxy-2'-fluoroadenosine-3'-phosphate
  modified_base 9: mod_base = OTHER; note = 2'-deoxy-2'-fluorouridine-3'-phosphate
  modified_base 10: mod_base = OTHER; note = 2'-O-methylcytidine-3'-phosphate
  modified_base 11: mod_base = OTHER; note = 2'-O-methyluridine-3'-phosphate
  modified_base 12: mod_base = OTHER; note = 2'-O-methylcytidine-3'-phosphate
  modified_base 13: mod_base = OTHER; note = 2'-O-methylcytidine-3'-phosphate
  modified_base 14: mod_base = OTHER; note = 2'-deoxy-2'-fluoroadenosine-3'-phosphate
  modified_base 15: mod_base = OTHER; note = 2'-O-methyladenosine-3'-phosphate
  modified_base 16: mod_base = OTHER; note = 2'-deoxy-2'-fluoroadenosine-3'-phosphate
  modified_base 17: mod_base = OTHER; note = 2'-O-methylcytidine-3'-phosphate
  modified_base 18: mod_base = OTHER; note = 2'-O-methyluridine-3'-phosphate
  modified_base 19: mod_base = OTHER; note = 2'-O-methylguanosine-3'-phosphate
  modified_base 20: mod_base = OTHER; note = 2'-O-methyladenosine-3'-phosphate
  modified_base 21: mod_base = OTHER; note = 2'-O-methyluridine-3'-phosphorothioate
  modified_base 22: mod_base = OTHER; note = 2'-O-methylguanosine-3'-phosphorothioate
  modified_base 23: mod_base = OTHER; note = 2'-O-methyladenosine
atgtattatctccaaactgatga

SEQ ID NO: 285 - RNA, 23 nt, synthetic construct
  source 1..23: mol_type = other RNA
  modified_base 1: mod_base = OTHER; note = 2'-O-methyladenosine-3'-phosphorothioate
  modified_base 2: mod_base = OTHER; note = 2'-deoxy-2'-fluoroadenosine-3'-phosphorothioate
  modified_base 3: mod_base = OTHER; note = 2'-O-methyluridine-3'-phosphate
  modified_base 4: mod_base = OTHER; note = 2'-O-methylcytidine-3'-phosphate
  modified_base 5: mod_base = OTHER; note = 2'-O-methyladenosine-3'-phosphate
  modified_base 6: mod_base = OTHER; note = 2'-deoxy-2'-fluorocytidine-3'-phosphate
  modified_base 7: mod_base = OTHER; note = 2'-O-methyladenosine-3'-phosphate
  modified_base 8: mod_base = OTHER; note = 2'-deoxy-2'-fluoroguanosine-3'-phosphate
  modified_base 9: mod_base = OTHER; note = 2'-deoxy-2'-fluoroadenosine-3'-phosphate
  modified_base 10: mod_base = OTHER; note = 2'-O-methyladenosine-3'-phosphate
  modified_base 11: mod_base = OTHER; note = 2'-O-methyluridine-3'-phosphate
  modified_base 12: mod_base = OTHER; note = 2'-O-methylcytidine-3'-phosphate
  modified_base 13: mod_base = OTHER; note = 2'-O-methyluridine-3'-phosphate
  modified_base 14: mod_base = OTHER; note = 2'-deoxy-2'-fluorouridine-3'-phosphate
  modified_base 15: mod_base = OTHER; note = 2'-O-methylcytidine-3'-phosphate
  modified_base 16: mod_base = OTHER; note = 2'-deoxy-2'-fluoroguanosine-3'-phosphate
  modified_base 17: mod_base = OTHER; note = 2'-O-methyladenosine-3'-phosphate
  modified_base 18: mod_base = OTHER; note = 2'-O-methyladenosine-3'-phosphate
  modified_base 19: mod_base = OTHER; note = 2'-O-methyladenosine-3'-phosphate
  modified_base 20: mod_base = OTHER; note = 2'-O-methylguanosine-3'-phosphate
  modified_base 21: mod_base = OTHER; note = 2'-O-methyladenosine-3'-phosphorothioate
  modified_base 22: mod_base = OTHER; note = 2'-O-methylcytidine-3'-phosphorothioate
  modified_base 23: mod_base = OTHER; note = 2'-O-methyladenosine
aatcacagaatcttcgaaagaca

SEQ ID NO: 286 - RNA, 23 nt, synthetic construct
  source 1..23: mol_type = other RNA
  modified_base 1: mod_base = OTHER; note = 2'-O-methyladenosine-3'-phosphorothioate
  modified_base 2: mod_base = OTHER; note = 2'-deoxy-2'-fluoroadenosine-3'-phosphorothioate
  modified_base 3: mod_base = OTHER; note = 2'-O-methylguanosine-3'-phosphate
  modified_base 4: mod_base = OTHER; note = 2'-O-methyladenosine-3'-phosphate
  modified_base 5: mod_base = OTHER; note = 2'-O-methyladenosine-3'-phosphate
  modified_base 6: mod_base = OTHER; note = 2'-deoxy-2'-fluorouridine-3'-phosphate
  modified_base 7: mod_base = OTHER; note = 2'-O-methylcytidine-3'-phosphate
  modified_base 8: mod_base = OTHER; note = 2'-deoxy-2'-fluorouridine-3'-phosphate
  modified_base 9: mod_base = OTHER; note = 2'-deoxy-2'-fluorouridine-3'-phosphate
  modified_base 10: mod_base = OTHER; note = 2'-O-methylcytidine-3'-phosphate
  modified_base 11: mod_base = OTHER; note = 2'-O-methylguanosine-3'-phosphate
  modified_base 12: mod_base = OTHER; note = 2'-O-methyladenosine-3'-phosphate
  modified_base 13: mod_base = OTHER; note = 2'-O-methyladenosine-3'-phosphate
  modified_base 14: mod_base = OTHER; note = 2'-deoxy-2'-fluoroadenosine-3'-phosphate
  modified_base 15: mod_base = OTHER; note = 2'-O-methylguanosine-3'-phosphate
  modified_base 16: mod_base = OTHER; note = 2'-deoxy-2'-fluoroadenosine-3'-phosphate
  modified_base 17: mod_base = OTHER; note = 2'-O-methylcytidine-3'-phosphate
  modified_base 18: mod_base = OTHER; note = 2'-O-methyladenosine-3'-phosphate
  modified_base 19: mod_base = OTHER; note = 2'-O-methylcytidine-3'-phosphate
  modified_base 20: mod_base = OTHER; note = 2'-O-methylcytidine-3'-phosphate
  modified_base 21: mod_base = OTHER; note = 2'-O-methyluridine-3'-phosphorothioate
  modified_base 22: mod_base = OTHER; note = 2'-O-methyluridine-3'-phosphorothioate
  modified_base 23: mod_base = OTHER; note = 2'-O-methylguanosine
aagaatcttcgaaagacaccttg

SEQ ID NO: 287 - RNA, 23 nt, synthetic construct
  source 1..23: mol_type = other RNA
  modified_base 1: mod_base = OTHER; note = 2'-O-methyluridine-3'-phosphorothioate
  modified_base 2: mod_base = OTHER; note = 2'-deoxy-2'-fluoroguanosine-3'-phosphorothioate
  modified_base 3: mod_base = OTHER; note = 2'-O-methyluridine-3'-phosphate
  modified_base 4: mod_base = OTHER; note = 2'-O-methylcytidine-3'-phosphate
  modified_base 5: mod_base = OTHER; note = 2'-O-methyluridine-3'-phosphate
  modified_base 6: mod_base = OTHER; note = 2'-deoxy-2'-fluoroguanosine-3'-phosphate
  modified_base 7: mod_base = OTHER; note = 2'-O-methylguanosine-3'-phosphate
  modified_base 8: mod_base = OTHER; note = 2'-deoxy-2'-fluoroadenosine-3'-phosphate
  modified_base 9: mod_base = OTHER; note = 2'-deoxy-2'-fluorouridine-3'-phosphate
  modified_base 10: mod_base = OTHER; note = 2'-O-methyladenosine-3'-phosphate
  modified_base 11: mod_base = OTHER; note = 2'-O-methylguanosine-3'-phosphate
  modified_base 12: mod_base = OTHER; note = 2'-O-methyladenosine-3'-phosphate
  modified_base 13: mod_base = OTHER; note = 2'-O-methylguanosine-3'-phosphate
  modified_base 14: mod_base = OTHER; note = 2'-deoxy-2'-fluoroguanosine-3'-phosphate
  modified_base 15: mod_base = OTHER; note = 2'-O-methyladenosine-3'-phosphate
  modified_base 16: mod_base = OTHER; note = 2'-deoxy-2'-fluorouridine-3'-phosphate
  modified_base 17: mod_base = OTHER; note = 2'-O-methyluridine-3'-phosphate
  modified_base 18: mod_base = OTHER; note = 2'-O-methyladenosine-3'-phosphate
  modified_base 19: mod_base = OTHER; note = 2'-O-methyladenosine-3'-phosphate
  modified_base 20: mod_base = OTHER; note = 2'-O-methyladenosine-3'-phosphate
  modified_base 21: mod_base = OTHER; note = 2'-O-methylguanosine-3'-phosphorothioate
  modified_base 22: mod_base = OTHER; note = 2'-O-methyluridine-3'-phosphorothioate
  modified_base 23: mod_base = OTHER; note = 2'-O-methylguanosine
tgtctggatagaggattaaagtg

SEQ ID NO: 288 - RNA, 23 nt, synthetic construct
  source 1..23: mol_type = other RNA
  modified_base 1: mod_base = OTHER; note = 2'-O-methyladenosine-3'-phosphorothioate
  modified_base 2: mod_base = OTHER; note = 2'-deoxy-2'-fluoroguanosine-3'-phosphorothioate
  modified_base 3: mod_base = OTHER; note = 2'-O-methyladenosine-3'-phosphate
  modified_base 4: mod_base = OTHER; note = 2'-O-methyluridine-3'-phosphate
  modified_base 5: mod_base = OTHER; note = 2'-O-methyluridine-3'-phosphate
  modified_base 6: mod_base = OTHER; note = 2'-deoxy-2'-fluoroadenosine-3'-phosphate
  modified_base 7: mod_base = OTHER; note = 2'-O-methyladenosine-3'-phosphate
  modified_base 8: mod_base = OTHER; note = 2'-deoxy-2'-fluoroadenosine-3'-phosphate
  modified_base 9: mod_base = OTHER; note = 2'-deoxy-2'-fluoroguanosine-3'-phosphate
  modified_base 10: mod_base = OTHER; note = 2'-O-methyluridine-3'-phosphate
  modified_base 11: mod_base = OTHER; note = 2'-O-methylguanosine-3'-phosphate
  modified_base 12: mod_base = OTHER; note = 2'-O-methyladenosine-3'-phosphate
  modified_base 13: mod_base = OTHER; note = 2'-O-methylguanosine-3'-phosphate
  modified_base 14: mod_base = OTHER; note = 2'-deoxy-2'-fluoroguanosine-3'-phosphate
  modified_base 15: mod_base = OTHER; note = 2'-O-methyladenosine-3'-phosphate
  modified_base 16: mod_base = OTHER; note = 2'-deoxy-2'-fluorocytidine-3'-phosphate
  modified_base 17: mod_base = OTHER; note = 2'-O-methylcytidine-3'-phosphate
  modified_base 18: mod_base = OTHER; note = 2'-O-methyluridine-3'-phosphate
  modified_base 19: mod_base = OTHER; note = 2'-O-methylguanosine-3'-phosphate
  modified_base 20: mod_base = OTHER; note = 2'-O-methylcytidine-3'-phosphate
  modified_base 21: mod_base = OTHER; note = 2'-O-methyladenosine-3'-phosphorothioate
  modified_base 22: mod_base = OTHER; note = 2'-O-methylcytidine-3'-phosphorothioate
  modified_base 23: mod_base = OTHER; note = 2'-O-methyluridine
agattaaagtgaggacctgcact

SEQ ID NO: 289 - RNA, 23 nt, synthetic construct
  source 1..23: mol_type = other RNA
  modified_base 1: mod_base = OTHER; note = 2'-O-methyladenosine-3'-phosphorothioate
  modified_base 2: mod_base = OTHER; note = 2'-deoxy-2'-fluorouridine-3'-phosphorothioate
  modified_base 3: mod_base = OTHER; note = 2'-O-methylcytidine-3'-phosphate
  modified_base 4: mod_base = OTHER; note = 2'-O-methyladenosine-3'-phosphate
  modified_base 5: mod_base = OTHER; note = 2'-O-methylcytidine-3'-phosphate
  modified_base 6: mod_base = OTHER; note = 2'-deoxy-2'-fluoroadenosine-3'-phosphate
  modified_base 7: mod_base = OTHER; note = 2'-O-methylguanosine-3'-phosphate
  modified_base 8: mod_base = OTHER; note = 2'-deoxy-2'-fluoroadenosine-3'-phosphate
  modified_base 9: mod_base = OTHER; note = 2'-deoxy-2'-fluoroadenosine-3'-phosphate
  modified_base 10: mod_base = OTHER; note = 2'-O-methyluridine-3'-phosphate
  modified_base 11: mod_base = OTHER; note = 2'-O-methylcytidine-3'-phosphate
  modified_base 12: mod_base = OTHER; note = 2'-O-methyluridine-3'-phosphate
  modified_base 13: mod_base = OTHER; note = 2'-O-methyluridine-3'-phosphate
  modified_base 14: mod_base = OTHER; note = 2'-deoxy-2'-fluorocytidine-3'-phosphate
  modified_base 15: mod_base = OTHER; note = 2'-O-methylguanosine-3'-phosphate
  modified_base 16: mod_base = OTHER; note = 2'-deoxy-2'-fluoroadenosine-3'-phosphate
  modified_base 17: mod_base = OTHER; note = 2'-O-methyladenosine-3'-phosphate
  modified_base 18: mod_base = OTHER; note = 2'-O-methyladenosine-3'-phosphate
  modified_base 19: mod_base = OTHER; note = 2'-O-methylguanosine-3'-phosphate
  modified_base 20: mod_base = OTHER; note = 2'-O-methyladenosine-3'-phosphate
  modified_base 21: mod_base = OTHER; note = 2'-O-methylcytidine-3'-phosphorothioate
  modified_base 22: mod_base = OTHER; note = 2'-O-methyladenosine-3'-phosphorothioate
  modified_base 23: mod_base = OTHER; note = 2'-O-methylcytidine
atcacagaatcttcgaaagacac

SEQ ID NO: 290 - RNA, 23 nt, synthetic construct
  source 1..23: mol_type = other RNA
  modified_base 1: mod_base = OTHER; note = 2'-O-methyladenosine-3'-phosphorothioate
  modified_base 2: mod_base = OTHER; note = 2'-deoxy-2'-fluoroadenosine-3'-phosphorothioate
  modified_base 3: mod_base = OTHER; note = 2'-O-methylguanosine-3'-phosphate
  modified_base 4: mod_base = OTHER; note = 2'-O-methylguanosine-3'-phosphate
  modified_base 5: mod_base = OTHER; note = 2'-O-methyladenosine-3'-phosphate
  modified_base 6: mod_base = OTHER; note = 2'-deoxy-2'-fluorouridine-3'-phosphate
  modified_base 7: mod_base = OTHER; note = 2'-O-methyluridine-3'-phosphate
  modified_base 8: mod_base = OTHER; note = 2'-deoxy-2'-fluoroadenosine-3'-phosphate
  modified_base 9: mod_base = OTHER; note = 2'-deoxy-2'-fluoroadenosine-3'-phosphate
  modified_base 10: mod_base = OTHER; note = 2'-O-methyladenosine-3'-phosphate
  modified_base 11: mod_base = OTHER; note = 2'-O-methylguanosine-3'-phosphate
  modified_base 12: mod_base = OTHER; note = 2'-O-methyluridine-3'-phosphate
  modified_base 13: mod_base = OTHER; note = 2'-O-methylguanosine-3'-phosphate
  modified_base 14: mod_base = OTHER; note = 2'-deoxy-2'-fluoroadenosine-3'-phosphate
  modified_base 15: mod_base = OTHER; note = 2'-O-methylguanosine-3'-phosphate
  modified_base 16: mod_base = OTHER; note = 2'-deoxy-2'-fluoroguanosine-3'-phosphate
  modified_base 17: mod_base = OTHER; note = 2'-O-methyladenosine-3'-phosphate
  modified_base 18: mod_base = OTHER; note = 2'-O-methylcytidine-3'-phosphate
  modified_base 19: mod_base = OTHER; note = 2'-O-methylcytidine-3'-phosphate
  modified_base 20: mod_base = OTHER; note = 2'-O-methyluridine-3'-phosphate
  modified_base 21: mod_base = OTHER; note = 2'-O-methylguanosine-3'-phosphorothioate
  modified_base 22: mod_base = OTHER; note = 2'-O-methylcytidine-3'-phosphorothioate
  modified_base 23: mod_base = OTHER; note = 2'-O-methyladenosine
aaggattaaagtgaggacctgca

SEQ ID NO: 291 - RNA, 23 nt, synthetic construct
  source 1..23: mol_type = other RNA
  modified_base 1: mod_base = OTHER; note = 2'-O-methyladenosine-3'-phosphorothioate
  modified_base 2: mod_base = OTHER; note = 2'-deoxy-2'-fluoroguanosine-3'-phosphorothioate
  modified_base 3: mod_base = OTHER; note = 2'-O-methyladenosine-3'-phosphate
  modified_base 4: mod_base = OTHER; note = 2'-O-methyluridine-3'-phosphate
  modified_base 5: mod_base = OTHER; note = 2'-O-methyladenosine-3'-phosphate
  modified_base 6: mod_base = OTHER; note = 2'-deoxy-2'-fluoroguanosine-3'-phosphate
  modified_base 7: mod_base = OTHER; note = 2'-O-methyladenosine-3'-phosphate
  modified_base 8: mod_base = OTHER; note = 2'-deoxy-2'-fluoroguanosine-3'-phosphate
  modified_base 9: mod_base = OTHER; note = 2'-deoxy-2'-fluoroguanosine-3'-phosphate
  modified_base 10: mod_base = OTHER; note = 2'-O-methyladenosine-3'-phosphate
  modified_base 11: mod_base = OTHER; note = 2'-O-methyluridine-3'-phosphate
  modified_base 12: mod_base = OTHER; note = 2'-O-methyluridine-3'-phosphate
  modified_base 13: mod_base = OTHER; note = 2'-O-methyladenosine-3'-phosphate
  modified_base 14: mod_base = OTHER; note = 2'-deoxy-2'-fluoroadenosine-3'-phosphate
  modified_base 15: mod_base = OTHER; note = 2'-O-methyladenosine-3'-phosphate
  modified_base 16: mod_base = OTHER; note = 2'-deoxy-2'-fluoroguanosine-3'-phosphate
  modified_base 17: mod_base = OTHER; note = 2'-O-methyluridine-3'-phosphate
  modified_base 18: mod_base = OTHER; note = 2'-O-methylguanosine-3'-phosphate
  modified_base 19: mod_base = OTHER; note = 2'-O-methyladenosine-3'-phosphate
  modified_base 20: mod_base = OTHER; note = 2'-O-methylguanosine-3'-phosphate
  modified_base 21: mod_base = OTHER; note = 2'-O-methylguanosine-3'-phosphorothioate
  modified_base 22: mod_base = OTHER; note = 2'-O-methyladenosine-3'-phosphorothioate
  modified_base 23: mod_base = OTHER; note = 2'-O-methylcytidine
agatagaggattaaagtgaggac

SEQ ID NO: 292 - RNA, 23 nt, synthetic construct
  source 1..23: mol_type = other RNA
  modified_base 1: mod_base = OTHER; note = 2'-O-methyladenosine-3'-phosphorothioate
  modified_base 2: mod_base = OTHER; note = 2'-deoxy-2'-fluoroadenosine-3'-phosphorothioate
  modified_base 3: mod_base = OTHER; note = 2'-O-methyladenosine-3'-phosphate
  modified_base 4: mod_base = OTHER; note = 2'-O-methylguanosine-3'-phosphate
  modified_base 5: mod_base = OTHER; note = 2'-O-methyluridine-3'-phosphate
  modified_base 6: mod_base = OTHER; note = 2'-deoxy-2'-fluoroguanosine-3'-phosphate
  modified_base 7: mod_base = OTHER; note = 2'-O-methyladenosine-3'-phosphate
  modified_base 8: mod_base = OTHER; note = 2'-deoxy-2'-fluoroguanosine-3'-phosphate
  modified_base 9: mod_base = OTHER; note = 2'-deoxy-2'-fluoroguanosine-3'-phosphate
  modified_base 10: mod_base = OTHER; note = 2'-O-methyladenosine-3'-phosphate
  modified_base 11: mod_base = OTHER; note = 2'-O-methylcytidine-3'-phosphate
  modified_base 12: mod_base = OTHER; note = 2'-O-methylcytidine-3'-phosphate
  modified_base 13: mod_base = OTHER; note = 2'-O-methyluridine-3'-phosphate
  modified_base 14: mod_base = OTHER; note = 2'-deoxy-2'-fluoroguanosine-3'-phosphate
  modified_base 15: mod_base = OTHER; note = 2'-O-methylcytidine-3'-phosphate
  modified_base 16: mod_base = OTHER; note = 2'-deoxy-2'-fluoroadenosine-3'-phosphate
  modified_base 17: mod_base = OTHER; note = 2'-O-methylcytidine-3'-phosphate
  modified_base 18: mod_base = OTHER; note = 2'-O-methyluridine-3'-phosphate
  modified_base 19: mod_base = OTHER; note = 2'-O-methylguanosine-3'-phosphate
  modified_base 20: mod_base = OTHER; note = 2'-O-methylguanosine-3'-phosphate
  modified_base 21: mod_base = OTHER; note = 2'-O-methyluridine-3'-phosphorothioate
  modified_base 22: mod_base = OTHER; note = 2'-O-methyladenosine-3'-phosphorothioate
  modified_base 23: mod_base = OTHER; note = 2'-O-methylcytidine
aaagtgaggacctgcactggtac

SEQ ID NO: 293 - RNA, 23 nt, synthetic construct
  source 1..23: mol_type = other RNA
  modified_base 1: mod_base = OTHER; note = 2'-O-methyladenosine-3'-phosphorothioate
  modified_base 2: mod_base = OTHER; note = 2'-deoxy-2'-fluorocytidine-3'-phosphorothioate
  modified_base 3: mod_base = OTHER; note = 2'-O-methyluridine-3'-phosphate
  modified_base 4: mod_base = OTHER; note = 2'-O-methyluridine-3'-phosphate
  modified_base 5: mod_base = OTHER; note = 2'-O-methyluridine-3'-phosphate
  modified_base 6: mod_base = OTHER; note = 2'-deoxy-2'-fluoroguanosine-3'-phosphate
  modified_base 7: mod_base = OTHER; note = 2'-O-methylcytidine-3'-phosphate
  modified_base 8: mod_base = OTHER; note = 2'-deoxy-2'-fluorocytidine-3'-phosphate
  modified_base 9: mod_base = OTHER; note = 2'-deoxy-2'-fluorocytidine-3'-phosphate
  modified_base 10: mod_base = OTHER; note = 2'-O-methyladenosine-3'-phosphate
  modified_base 11: mod_base = OTHER; note = 2'-O-methyladenosine-3'-phosphate
  modified_base 12: mod_base = OTHER; note = 2'-O-methylguanosine-3'-phosphate
  modified_base 13: mod_base = OTHER; note = 2'-O-methyluridine-3'-phosphate
  modified_base 14: mod_base = OTHER; note = 2'-deoxy-2'-fluorocytidine-3'-phosphate
  modified_base 15: mod_base = OTHER; note = 2'-O-methyladenosine-3'-phosphate
  modified_base 16: mod_base = OTHER; note = 2'-deoxy-2'-fluorouridine-3'-phosphate
  modified_base 17: mod_base = OTHER; note = 2'-O-methylcytidine-3'-phosphate
  modified_base 18: mod_base = OTHER; note = 2'-O-methyluridine-3'-phosphate
  modified_base 19: mod_base = OTHER; note = 2'-O-methylguanosine-3'-phosphate
  modified_base 20: mod_base = OTHER; note = 2'-O-methylcytidine-3'-phosphate
  modified_base 21: mod_base = OTHER; note = 2'-O-methyluridine-3'-phosphorothioate
  modified_base 22: mod_base = OTHER; note = 2'-O-methyluridine-3'-phosphorothioate
  modified_base 23: mod_base = OTHER; note = 2'-O-methyluridine
actttgcccaagtcatctgcttt

SEQ ID NO: 294 - RNA, 23 nt, synthetic construct
  source 1..23: mol_type = other RNA
  modified_base 1: mod_base = OTHER; note = 2'-O-methyladenosine-3'-phosphorothioate
  modified_base 2: mod_base = OTHER; note = 2'-deoxy-2'-fluorocytidine-3'-phosphorothioate
  modified_base 3: mod_base = OTHER; note = 2'-O-methylcytidine-3'-phosphate
  modified_base 4: mod_base = OTHER; note = 2'-O-methylcytidine-3'-phosphate
  modified_base 5: mod_base = OTHER; note = 2'-O-methyladenosine-3'-phosphate
  modified_base 6: mod_base = OTHER; note = 2'-deoxy-2'-fluoroadenosine-3'-phosphate
  modified_base 7: mod_base = OTHER; note = 2'-O-methylguanosine-3'-phosphate
  modified_base 8: mod_base = OTHER; note = 2'-deoxy-2'-fluorouridine-3'-phosphate
  modified_base 9: mod_base = OTHER; note = 2'-deoxy-2'-fluorocytidine-3'-phosphate
  modified_base 10: mod_base = OTHER; note = 2'-O-methyladenosine-3'-phosphate
  modified_base 11: mod_base = OTHER; note = 2'-O-methyluridine-3'-phosphate
  modified_base 12: mod_base = OTHER; note = 2'-O-methylcytidine-3'-phosphate
  modified_base 13: mod_base = OTHER; note = 2'-O-methyluridine-3'-phosphate
  modified_base 14: mod_base = OTHER; note = 2'-deoxy-2'-fluoroguanosine-3'-phosphate
  modified_base 15: mod_base = OTHER; note = 2'-O-methylcytidine-3'-phosphate
  modified_base 16: mod_base = OTHER; note = 2'-deoxy-2'-fluorouridine-3'-phosphate
  modified_base 17: mod_base = OTHER; note = 2'-O-methyluridine-3'-phosphate
  modified_base 18: mod_base = OTHER; note = 2'-O-methyluridine-3'-phosphate
  modified_base 19: mod_base = OTHER; note = 2'-O-methyluridine-3'-phosphate
  modified_base 20: mod_base = OTHER; note = 2'-O-methyluridine-3'-phosphate
  modified_base 21: mod_base = OTHER; note = 2'-O-methylcytidine-3'-phosphorothioate
  modified_base 22: mod_base = OTHER; note = 2'-O-methyladenosine-3'-phosphorothioate
  modified_base 23: mod_base = OTHER; note = 2'-O-methyluridine
acccaagtcatctgctttttcat

SEQ ID NO: 295 - RNA, 23 nt, synthetic construct
  source 1..23: mol_type = other RNA
  modified_base 1: mod_base = OTHER; note = 2'-O-methyladenosine-3'-phosphorothioate
  modified_base 2: mod_base = OTHER; note = 2'-deoxy-2'-fluorouridine-3'-phosphorothioate
  modified_base 3: mod_base = OTHER; note = 2'-O-methyluridine-3'-phosphate
  modified_base 4: mod_base = OTHER; note = 2'-O-methyladenosine-3'-phosphate
  modified_base 5: mod_base = OTHER; note = 2'-O-methylcytidine-3'-phosphate
  modified_base 6: mod_base = OTHER; note = 2'-deoxy-2'-fluorouridine-3'-phosphate
  modified_base 7: mod_base = OTHER; note = 2'-O-methyluridine-3'-phosphate
  modified_base 8: mod_base = OTHER; note = 2'-deoxy-2'-fluorouridine-3'-phosphate
  modified_base 9: mod_base = OTHER; note = 2'-deoxy-2'-fluorocytidine-3'-phosphate
  modified_base 10: mod_base = OTHER; note = 2'-O-methylcytidine-3'-phosphate
  modified_base 11: mod_base = OTHER; note = 2'-O-methyluridine-3'-phosphate
  modified_base 12: mod_base = OTHER; note = 2'-O-methyluridine-3'-phosphate
  modified_base 13: mod_base = OTHER; note = 2'-O-methylcytidine-3'-phosphate
  modified_base 14: mod_base = OTHER; note = 2'-deoxy-2'-fluorouridine-3'-phosphate
  modified_base 15: mod_base = OTHER; note = 2'-O-methylguanosine-3'-phosphate
  modified_base 16: mod_base = OTHER; note = 2'-deoxy-2'-fluorocytidine-3'-phosphate
  modified_base 17: mod_base = OTHER; note = 2'-O-methyluridine-3'-phosphate
  modified_base 18: mod_base = OTHER; note = 2'-O-methylcytidine-3'-phosphate
  modified_base 19: mod_base = OTHER; note = 2'-O-methylguanosine-3'-phosphate
  modified_base 20: mod_base = OTHER; note = 2'-O-methyladenosine-3'-phosphate
  modified_base 21: mod_base = OTHER; note = 2'-O-methyladenosine-3'-phosphorothioate
  modified_base 22: mod_base = OTHER; note = 2'-O-methyladenosine-3'-phosphorothioate
  modified_base 23: mod_base = OTHER; note = 2'-O-methyluridine
attactttccttctgctcgaaat

SEQ ID NO: 296 - RNA, 23 nt, synthetic construct
  source 1..23: mol_type = other RNA
  modified_base 1: mod_base = OTHER; note = 2'-O-methyluridine-3'-phosphorothioate
  modified_base 2: mod_base = OTHER; note = 2'-deoxy-2'-fluoroadenosine-3'-phosphorothioate
  modified_base 3: mod_base = OTHER; note = 2'-O-methylcytidine-3'-phosphate
  modified_base 4: mod_base = OTHER; note = 2'-O-methyluridine-3'-phosphate
  modified_base 5: mod_base = OTHER; note = 2'-O-methyluridine-3'-phosphate
  modified_base 6: mod_base = OTHER; note = 2'-deoxy-2'-fluorouridine-3'-phosphate
  modified_base 7: mod_base = OTHER; note = 2'-O-methylcytidine-3'-phosphate
  modified_base 8: mod_base = OTHER; note = 2'-deoxy-2'-fluorocytidine-3'-phosphate
  modified_base 9: mod_base = OTHER; note = 2'-deoxy-2'-fluorouridine-3'-phosphate
  modified_base 10: mod_base = OTHER; note = 2'-O-methyluridine-3'-phosphate
  modified_base 11: mod_base = OTHER; note = 2'-O-methylcytidine-3'-phosphate
  modified_base 12: mod_base = OTHER; note = 2'-O-methyluridine-3'-phosphate
  modified_base 13: mod_base = OTHER; note = 2'-O-methylguanosine-3'-phosphate
  modified_base 14: mod_base = OTHER; note = 2'-deoxy-2'-fluorocytidine-3'-phosphate
  modified_base 15: mod_base = OTHER; note = 2'-O-methyluridine-3'-phosphate
  modified_base 16: mod_base = OTHER; note = 2'-deoxy-2'-fluorocytidine-3'-phosphate
  modified_base 17: mod_base = OTHER; note = 2'-O-methylguanosine-3'-phosphate
  modified_base 18: mod_base = OTHER; note = 2'-O-methyladenosine-3'-phosphate
  modified_base 19: mod_base = OTHER; note = 2'-O-methyladenosine-3'-phosphate
  modified_base 20: mod_base = OTHER; note = 2'-O-methyladenosine-3'-phosphate
  modified_base 21: mod_base = OTHER; note = 2'-O-methyluridine-3'-phosphorothioate
  modified_base 22: mod_base = OTHER; note = 2'-O-methyluridine-3'-phosphorothioate
  modified_base 23: mod_base = OTHER; note = 2'-O-methylguanosine
tactttccttctgctcgaaattg

SEQ ID NO: 297 - RNA, 23 nt, synthetic construct
  source 1..23: mol_type = other RNA
  modified_base 1: mod_base = OTHER; note = 2'-O-methyluridine-3'-phosphorothioate
  modified_base 2: mod_base = OTHER; note = 2'-deoxy-2'-fluorouridine-3'-phosphorothioate
  modified_base 3: mod_base = OTHER; note = 2'-O-methylguanosine-3'-phosphate
  modified_base 4: mod_base = OTHER; note = 2'-O-methyluridine-3'-phosphate
  modified_base 5: mod_base = OTHER; note = 2'-O-methylguanosine-3'-phosphate
  modified_base 6: mod_base = OTHER; note = 2'-deoxy-2'-fluorouridine-3'-phosphate
  modified_base 7: mod_base = OTHER; note = 2'-O-methyladenosine-3'-phosphate
  modified_base 8: mod_base = OTHER; note = 2'-deoxy-2'-fluorouridine-3'-phosphate
  modified_base 9: mod_base = OTHER; note = 2'-deoxy-2'-fluorouridine-3'-phosphate
  modified_base 10: mod_base = OTHER; note = 2'-O-methyladenosine-3'-phosphate
  modified_base 11: mod_base = OTHER; note = 2'-O-methyluridine-3'-phosphate
  modified_base 12: mod_base = OTHER; note = 2'-O-methylcytidine-3'-phosphate
  modified_base 13: mod_base = OTHER; note = 2'-O-methyluridine-3'-phosphate
  modified_base 14: mod_base = OTHER; note = 2'-deoxy-2'-fluorocytidine-3'-phosphate
  modified_base 15: mod_base = OTHER; note = 2'-O-methylcytidine-3'-phosphate
  modified_base 16: mod_base = OTHER; note = 2'-deoxy-2'-fluoroadenosine-3'-phosphate
  modified_base 17: mod_base = OTHER; note = 2'-O-methyladenosine-3'-phosphate
  modified_base 18: mod_base = OTHER; note = 2'-O-methyladenosine-3'-phosphate
  modified_base 19: mod_base = OTHER; note = 2'-O-methylcytidine-3'-phosphate
  modified_base 20: mod_base = OTHER; note = 2'-O-methyluridine-3'-phosphate
  modified_base 21: mod_base = OTHER; note = 2'-O-methylguanosine-3'-phosphorothioate
  modified_base 22: mod_base = OTHER; note = 2'-O-methyladenosine-3'-phosphorothioate
  modified_base 23: mod_base = OTHER; note = 2'-O-methyluridine
ttgtgtattatctccaaactgat

SEQ ID NO: 298 - RNA, 23 nt, synthetic construct
  source 1..23: mol_type = other RNA
  modified_base 1: mod_base = OTHER; note = 2'-O-methyluridine-3'-phosphorothioate
  modified_base 2: mod_base = OTHER; note = 2'-deoxy-2'-fluoroadenosine-3'-phosphorothioate
  modified_base 3: mod_base = OTHER; note = 2'-O-methyluridine-3'-phosphate
  modified_base 4: mod_base = OTHER; note = 2'-O-methyluridine-3'-phosphate
  modified_base 5: mod_base = OTHER; note = 2'-O-methyladenosine-3'-phosphate
  modified_base 6: mod_base = OTHER; note = 2'-deoxy-2'-fluorouridine-3'-phosphate
  modified_base 7: mod_base = OTHER; note = 2'-O-methylcytidine-3'-phosphate
  modified_base 8: mod_base = OTHER; note = 2'-deoxy-2'-fluorouridine-3'-phosphate
  modified_base 9: mod_base = OTHER; note = 2'-deoxy-2'-fluorocytidine-3'-phosphate
  modified_base 10: mod_base = OTHER; note = 2'-O-methylcytidine-3'-phosphate
  modified_base 11: mod_base = OTHER; note = 2'-O-methyladenosine-3'-phosphate
  modified_base 12: mod_base = OTHER; note = 2'-O-methyladenosine-3'-phosphate
  modified_base 13: mod_base = OTHER; note = 2'-O-methyladenosine-3'-phosphate
  modified_base 14: mod_base = OTHER; note = 2'-deoxy-2'-fluorocytidine-3'-phosphate
  modified_base 15: mod_base = OTHER; note = 2'-O-methyluridine-3'-phosphate
  modified_base 16: mod_base = OTHER; note = 2'-deoxy-2'-fluoroguanosine-3'-phosphate
  modified_base 17: mod_base = OTHER; note = 2'-O-methyladenosine-3'-phosphate
  modified_base 18: mod_base = OTHER; note = 2'-O-methyluridine-3'-phosphate
  modified_base 19: mod_base = OTHER; note = 2'-O-methylguanosine-3'-phosphate
  modified_base 20: mod_base = OTHER; note = 2'-O-methyladenosine-3'-phosphate
  modified_base 21: mod_base = OTHER; note = 2'-O-methyladenosine-3'-phosphorothioate
  modified_base 22: mod_base = OTHER; note = 2'-O-methylcytidine-3'-phosphorothioate
  modified_base 23: mod_base = OTHER; note = 2'-O-methyladenosine
tattatctccaaactgatgaaca

SEQ ID NO: 299 - RNA, 23 nt, synthetic construct
  source 1..23: mol_type = other RNA
  modified_base 1: mod_base = OTHER; note = 2'-O-methyluridine-3'-phosphorothioate
  modified_base 2: mod_base = OTHER; note = 2'-deoxy-2'-fluoroguanosine-3'-phosphorothioate
  modified_base 3: mod_base = OTHER; note = 2'-O-methylguanosine-3'-phosphate
  modified_base 4: mod_base = OTHER; note = 2'-O-methyladenosine-3'-phosphate
  modified_base 5: mod_base = OTHER; note = 2'-O-methyluridine-3'-phosphate
  modified_base 6: mod_base = OTHER; note = 2'-deoxy-2'-fluoroadenosine-3'-phosphate
  modified_base 7: mod_base = OTHER; note = 2'-O-methylguanosine-3'-phosphate
  modified_base 8: mod_base = OTHER; note = 2'-deoxy-2'-fluoroadenosine-3'-phosphate
  modified_base 9: mod_base = OTHER; note = 2'-deoxy-2'-fluoroguanosine-3'-phosphate
  modified_base 10: mod_base = OTHER; note = 2'-O-methylguanosine-3'-phosphate
  modified_base 11: mod_base = OTHER; note = 2'-O-methyladenosine-3'-phosphate
  modified_base 12: mod_base = OTHER; note = 2'-O-methyluridine-3'-phosphate
  modified_base 13: mod_base = OTHER; note = 2'-O-methyluridine-3'-phosphate
  modified_base 14: mod_base = OTHER; note = 2'-deoxy-2'-fluoroadenosine-3'-phosphate
  modified_base 15: mod_base = OTHER; note = 2'-O-methyladenosine-3'-phosphate
  modified_base 16: mod_base = OTHER; note = 2'-deoxy-2'-fluoroadenosine-3'-phosphate
  modified_base 17: mod_base = OTHER; note = 2'-O-methylguanosine-3'-phosphate
  modified_base 18: mod_base = OTHER; note = 2'-O-methyluridine-3'-phosphate
  modified_base 19: mod_base = OTHER; note = 2'-O-methylguanosine-3'-phosphate
  modified_base 20: mod_base = OTHER; note = 2'-O-methyladenosine-3'-phosphate
  modified_base 21: mod_base = OTHER; note = 2'-O-methylguanosine-3'-phosphorothioate
  modified_base 22: mod_base = OTHER; note = 2'-O-methylguanosine-3'-phosphorothioate
  modified_base 23: mod_base = OTHER; note = 2'-O-methyladenosine
tggatagaggattaaagtgagga

SEQ ID NO: 300 - RNA, 23 nt, synthetic construct
  source 1..23: mol_type = other RNA
  modified_base 1: mod_base = OTHER; note = 2'-O-methyladenosine-3'-phosphorothioate
  modified_base 2: mod_base = OTHER; note = 2'-deoxy-2'-fluoroguanosine-3'-phosphorothioate
  modified_base 3: mod_base = OTHER; note = 2'-O-methyladenosine-3'-phosphate
  modified_base 4: mod_base = OTHER; note = 2'-O-methylguanosine-3'-phosphate
  modified_base 5: mod_base = OTHER; note = 2'-O-methyladenosine-3'-phosphate
  modified_base 6: mod_base = OTHER; note = 2'-deoxy-2'-fluorouridine-3'-phosphate
  modified_base 7: mod_base = OTHER; note = 2'-O-methylcytidine-3'-phosphate
  modified_base 8: mod_base = OTHER; note = 2'-deoxy-2'-fluoroadenosine-3'-phosphate
  modified_base 9: mod_base = OTHER; note = 2'-deoxy-2'-fluorocytidine-3'-phosphate
  modified_base 10: mod_base = OTHER; note = 2'-O-methyladenosine-3'-phosphate
  modified_base 11: mod_base = OTHER; note = 2'-O-methylguanosine-3'-phosphate
  modified_base 12: mod_base = OTHER; note = 2'-O-methyladenosine-3'-phosphate
  modified_base 13: mod_base = OTHER; note = 2'-O-methyladenosine-3'-phosphate
  modified_base 14: mod_base = OTHER; note = 2'-deoxy-2'-fluorouridine-3'-phosphate
  modified_base 15: mod_base = OTHER; note = 2'-O-methylcytidine-3'-phosphate
  modified_base 16: mod_base = OTHER; note = 2'-deoxy-2'-fluorouridine-3'-phosphate
  modified_base 17: mod_base = OTHER; note = 2'-O-methyluridine-3'-phosphate
  modified_base 18: mod_base = OTHER; note = 2'-O-methylcytidine-3'-phosphate
  modified_base 19: mod_base = OTHER; note = 2'-O-methylguanosine-3'-phosphate
  modified_base 20: mod_base = OTHER; note = 2'-O-methyladenosine-3'-phosphate
  modified_base 21: mod_base = OTHER; note = 2'-O-methyladenosine-3'-phosphorothioate
  modified_base 22: mod_base = OTHER; note = 2'-O-methyladenosine-3'-phosphorothioate
  modified_base 23: mod_base = OTHER; note = 2'-O-methylguanosine
agagatcacagaatcttcgaaag

SEQ ID NO: 301 - RNA, 23 nt, synthetic construct
  source 1..23: mol_type = other RNA
  modified_base 1: mod_base = OTHER; note = 2'-O-methyladenosine-3'-phosphorothioate
  modified_base 2: mod_base = OTHER; note = 2'-deoxy-2'-fluorouridine-3'-phosphorothioate
  modified_base 3: mod_base = OTHER; note = 2'-O-methyluridine-3'-phosphate
  modified_base 4: mod_base = OTHER; note = 2'-O-methyluridine-3'-phosphate
  modified_base 5: mod_base = OTHER; note = 2'-O-methylguanosine-3'-phosphate
  modified_base 6: mod_base = OTHER; note = 2'-deoxy-2'-fluorocytidine-3'-phosphate
  modified_base 7: mod_base = OTHER; note = 2'-O-methylcytidine-3'-phosphate
  modified_base 8: mod_base = OTHER; note = 2'-deoxy-2'-fluorocytidine-3'-phosphate
  modified_base 9: mod_base = OTHER; note = 2'-deoxy-2'-fluoroadenosine-3'-phosphate
  modified_base 10: mod_base = OTHER; note = 2'-O-methyladenosine-3'-phosphate
  modified_base 11: mod_base = OTHER; note = 2'-O-methylguanosine-3'-phosphate
  modified_base 12: mod_base = OTHER; note = 2'-O-methyluridine-3'-phosphate
  modified_base 13: mod_base = OTHER; note = 2'-O-methylcytidine-3'-phosphate
  modified_base 14: mod_base = OTHER; note = 2'-deoxy-2'-fluoroadenosine-3'-phosphate
  modified_base 15: mod_base = OTHER; note = 2'-O-methyluridine-3'-phosphate
  modified_base 16: mod_base = OTHER; note = 2'-deoxy-2'-fluorocytidine-3'-phosphate
  modified_base 17: mod_base = OTHER; note = 2'-O-methyluridine-3'-phosphate
  modified_base 18: mod_base = OTHER; note = 2'-O-methylguanosine-3'-phosphate
  modified_base 19: mod_base = OTHER; note = 2'-O-methylcytidine-3'-phosphate
  modified_base 20: mod_base = OTHER; note = 2'-O-methyluridine-3'-phosphate
  modified_base 21: mod_base = OTHER; note = 2'-O-methyluridine-3'-phosphorothioate
  modified_base 22: mod_base = OTHER; note = 2'-O-methyluridine-3'-phosphorothioate
  modified_base 23: mod_base = OTHER; note = 2'-O-methyluridine
atttgcccaagtcatctgctttt

SEQ ID NO: 302 - RNA, 23 nt, synthetic construct
  source 1..23: mol_type = other RNA
  modified_base 1: mod_base = OTHER; note = 2'-O-methyluridine-3'-phosphorothioate
  modified_base 2: mod_base = OTHER; note = 2'-deoxy-2'-fluoroadenosine-3'-phosphorothioate
  modified_base 3: mod_base = OTHER; note = 2'-O-methylguanosine-3'-phosphate
  modified_base 4: mod_base = OTHER; note = 2'-O-methyladenosine-3'-phosphate
  modified_base 5: mod_base = OTHER; note = 2'-O-methylguanosine-3'-phosphate
  modified_base 6: mod_base = OTHER; note = 2'-deoxy-2'-fluoroguanosine-3'-phosphate
  modified_base 7: mod_base = OTHER; note = 2'-O-methyladenosine-3'-phosphate
  modified_base 8: mod_base = OTHER; note = 2'-deoxy-2'-fluorouridine-3'-phosphate
  modified_base 9: mod_base = OTHER; note = 2'-deoxy-2'-fluorouridine-3'-phosphate
  modified_base 10: mod_base = OTHER; note = 2'-O-methyladenosine-3'-phosphate
  modified_base 11: mod_base = OTHER; note = 2'-O-methyladenosine-3'-phosphate
  modified_base 12: mod_base = OTHER; note = 2'-O-methyladenosine-3'-phosphate
  modified_base 13: mod_base = OTHER; note = 2'-O-methylguanosine-3'-phosphate
  modified_base 14: mod_base = OTHER; note = 2'-deoxy-2'-fluorouridine-3'-phosphate
  modified_base 15: mod_base = OTHER; note = 2'-O-methylguanosine-3'-phosphate
  modified_base 16: mod_base = OTHER; note = 2'-deoxy-2'-fluoroadenosine-3'-phosphate
  modified_base 17: mod_base = OTHER; note = 2'-O-methylguanosine-3'-phosphate
  modified_base 18: mod_base = OTHER; note = 2'-O-methylguanosine-3'-phosphate
  modified_base 19: mod_base = OTHER; note = 2'-O-methyladenosine-3'-phosphate
  modified_base 20: mod_base = OTHER; note = 2'-O-methylcytidine-3'-phosphate
  modified_base 21: mod_base = OTHER; note = 2'-O-methylcytidine-3'-phosphorothioate
  modified_base 22: mod_base = OTHER; note = 2'-O-methyluridine-3'-phosphorothioate
  modified_base 23: mod_base = OTHER; note = 2'-O-methylguanosine
tagaggattaaagtgaggacctg

SEQ ID NO: 303 - RNA, 23 nt, synthetic construct
  source 1..23: mol_type = other RNA
  modified_base 1: mod_base = OTHER; note = 2'-O-methyluridine-3'-phosphorothioate
  modified_base 2: mod_base = OTHER; note = 2'-deoxy-2'-fluorouridine-3'-phosphorothioate
  modified_base 3: mod_base = OTHER; note = 2'-O-methyladenosine-3'-phosphate
  modified_base 4: mod_base = OTHER; note = 2'-O-methyladenosine-3'-phosphate
  modified_base 5: mod_base = OTHER; note = 2'-O-methyladenosine-3'-phosphate
  modified_base 6: mod_base = OTHER; note = 2'-deoxy-2'-fluoroguanosine-3'-phosphate
  modified_base 7: mod_base = OTHER; note = 2'-O-methyluridine-3'-phosphate
  modified_base 8: mod_base = OTHER; note = 2'-deoxy-2'-fluoroguanosine-3'-phosphate
  modified_base 9: mod_base = OTHER; note = 2'-deoxy-2'-fluoroadenosine-3'-phosphate
  modified_base 10: mod_base = OTHER; note = 2'-O-methylguanosine-3'-phosphate
  modified_base 11: mod_base = OTHER; note = 2'-O-methylguanosine-3'-phosphate
  modified_base 12: mod_base = OTHER; note = 2'-O-methyladenosine-3'-phosphate
  modified_base 13: mod_base = OTHER; note = 2'-O-methylcytidine-3'-phosphate
  modified_base 14: mod_base = OTHER; note = 2'-deoxy-2'-fluorocytidine-3'-phosphate
  modified_base 15: mod_base = OTHER; note = 2'-O-methyluridine-3'-phosphate
  modified_base 16: mod_base = OTHER; note = 2'-deoxy-2'-fluoroguanosine-3'-phosphate
  modified_base 17: mod_base = OTHER; note = 2'-O-methylcytidine-3'-phosphate
  modified_base 18: mod_base = OTHER; note = 2'-O-methyladenosine-3'-phosphate
  modified_base 19: mod_base = OTHER; note = 2'-O-methylcytidine-3'-phosphate
  modified_base 20: mod_base = OTHER; note = 2'-O-methyluridine-3'-phosphate
  modified_base 21: mod_base = OTHER; note = 2'-O-methylguanosine-3'-phosphorothioate
  modified_base 22: mod_base = OTHER; note = 2'-O-methylguanosine-3'-phosphorothioate
  modified_base 23: mod_base = OTHER; note = 2'-O-methyluridine
ttaaagtgaggacctgcactggt

SEQ ID NO: 304 - RNA, 23 nt, synthetic construct
  source 1..23: mol_type = other RNA
  modified_base 1: mod_base = OTHER; note = 2'-O-methyladenosine-3'-phosphorothioate
  modified_base 2: mod_base = OTHER; note = 2'-deoxy-2'-fluorocytidine-3'-phosphorothioate
  modified_base 3: mod_base = OTHER; note = 2'-O-methyluridine-3'-phosphate
  modified_base 4: mod_base = OTHER; note = 2'-O-methyluridine-3'-phosphate
  modified_base 5: mod_base = OTHER; note = 2'-O-methylcytidine-3'-phosphate
  modified_base 6: mod_base = OTHER; note = 2'-deoxy-2'-fluoroadenosine-3'-phosphate
  modified_base 7: mod_base = OTHER; note = 2'-O-methylguanosine-3'-phosphate
  modified_base 8: mod_base = OTHER; note = 2'-deoxy-2'-fluorouridine-3'-phosphate
  modified_base 9: mod_base = OTHER; note = 2'-deoxy-2'-fluorocytidine-3'-phosphate
  modified_base 10: mod_base = OTHER; note = 2'-O-methyladenosine-3'-phosphate
  modified_base 11: mod_base = OTHER; note = 2'-O-methyladenosine-3'-phosphate
  modified_base 12: mod_base = OTHER; note = 2'-O-methyluridine-3'-phosphate
  modified_base 13: mod_base = OTHER; note = 2'-O-methylcytidine-3'-phosphate
  modified_base 14: mod_base = OTHER; note = 2'-deoxy-2'-fluorocytidine-3'-phosphate
  modified_base 15: mod_base = OTHER; note = 2'-O-methyluridine-3'-phosphate
  modified_base 16: mod_base = OTHER; note = 2'-deoxy-2'-fluoroguanosine-3'-phosphate
  modified_base 17: mod_base = OTHER; note = 2'-O-methyluridine-3'-phosphate
  modified_base 18: mod_base = OTHER; note = 2'-O-methyladenosine-3'-phosphate
  modified_base 19: mod_base = OTHER; note = 2'-O-methyladenosine-3'-phosphate
  modified_base 20: mod_base = OTHER; note = 2'-O-methyluridine-3'-phosphate
  modified_base 21: mod_base = OTHER; note = 2'-O-methylguanosine-3'-phosphorothioate
  modified_base 22: mod_base = OTHER; note = 2'-O-methylcytidine-3'-phosphorothioate
  modified_base 23: mod_base = OTHER; note = 2'-O-methyluridine
acttcagtcaatcctgtaatgct

SEQ ID NO: 305 - RNA, 23 nt, synthetic construct
  source 1..23: mol_type = other RNA
  modified_base 1: mod_base = OTHER; note = 2'-O-methyladenosine-3'-phosphorothioate
  modified_base 2: mod_base = OTHER; note = 2'-deoxy-2'-fluoroguanosine-3'-phosphorothioate
  modified_base 3: mod_base = OTHER; note = 2'-O-methyluridine-3'-phosphate
  modified_base 4: mod_base = OTHER; note = 2'-O-methyluridine-3'-phosphate
  modified_base 5: mod_base = OTHER; note = 2'-O-methyluridine-3'-phosphate
  modified_base 6: mod_base = OTHER; note = 2'-deoxy-2'-fluorocytidine-3'-phosphate
  modified_base 7: mod_base = OTHER; note = 2'-O-methylcytidine-3'-phosphate
  modified_base 8: mod_base = OTHER; note = 2'-deoxy-2'-fluorouridine-3'-phosphate
  modified_base 9: mod_base = OTHER; note = 2'-deoxy-2'-fluoroguanosine-3'-phosphate
  modified_base 10: mod_base = OTHER; note = 2'-O-methyluridine-3'-phosphate
  modified_base 11: mod_base = OTHER; note = 2'-O-methylcytidine-3'-phosphate
  modified_base 12: mod_base = OTHER; note = 2'-O-methyluridine-3'-phosphate
  modified_base 13: mod_base = OTHER; note = 2'-O-methyluridine-3'-phosphate
  modified_base 14: mod_base = OTHER; note = 2'-deoxy-2'-fluorouridine-3'-phosphate
  modified_base 15: mod_base = OTHER; note = 2'-O-methyluridine-3'-phosphate
  modified_base 16: mod_base = OTHER; note = 2'-deoxy-2'-fluorouridine-3'-phosphate
  modified_base 17: mod_base = OTHER; note = 2'-O-methyladenosine-3'-phosphate
  modified_base 18: mod_base = OTHER; note = 2'-O-methylcytidine-3'-phosphate
  modified_base 19: mod_base = OTHER; note = 2'-O-methyluridine-3'-phosphate
  modified_base 20: mod_base = OTHER; note = 2'-O-methyluridine-3'-phosphate
  modified_base 21: mod_base = OTHER; note = 2'-O-methyluridine-3'-phosphorothioate
  modified_base 22: mod_base = OTHER; note = 2'-O-methylcytidine-3'-phosphorothioate
  modified_base 23: mod_base = OTHER; note = 2'-O-methyluridine
agtttcctgtctttttactttct

SEQ ID NO: 306 - RNA, 23 nt, synthetic construct
  source 1..23: mol_type = other RNA
  modified_base 1: mod_base = OTHER; note = 2'-O-methyladenosine-3'-phosphorothioate
  modified_base 2: mod_base = OTHER; note = 2'-deoxy-2'-fluorouridine-3'-phosphorothioate
  modified_base 3: mod_base = OTHER; note = 2'-O-methyluridine-3'-phosphate
  modified_base 4: mod_base = OTHER; note = 2'-O-methylguanosine-3'-phosphate
  modified_base 5: mod_base = OTHER; note = 2'-O-methyluridine-3'-phosphate
  modified_base 6: mod_base = OTHER; note = 2'-deoxy-2'-fluoroguanosine-3'-phosphate
  modified_base 7: mod_base = OTHER; note = 2'-O-methyluridine-3'-phosphate
  modified_base 8: mod_base = OTHER; note = 2'-deoxy-2'-fluoroadenosine-3'-phosphate
  modified_base 9: mod_base = OTHER; note = 2'-deoxy-2'-fluorouridine-3'-phosphate
  modified_base 10: mod_base = OTHER; note = 2'-O-methyluridine-3'-phosphate
  modified_base 11: mod_base = OTHER; note = 2'-O-methyladenosine-3'-phosphate
  modified_base 12: mod_base = OTHER; note = 2'-O-methyluridine-3'-phosphate
  modified_base 13: mod_base = OTHER; note = 2'-O-methylcytidine-3'-phosphate
  modified_base 14: mod_base = OTHER; note = 2'-deoxy-2'-fluorouridine-3'-phosphate
  modified_base 15: mod_base = OTHER; note = 2'-O-methylcytidine-3'-phosphate
  modified_base 16: mod_base = OTHER; note = 2'-deoxy-2'-fluorocytidine-3'-phosphate
  modified_base 17: mod_base = OTHER; note = 2'-O-methyladenosine-3'-phosphate
  modified_base 18: mod_base = OTHER; note = 2'-O-methyladenosine-3'-phosphate
  modified_base 19: mod_base = OTHER; note = 2'-O-methyladenosine-3'-phosphate
  modified_base 20: mod_base = OTHER; note = 2'-O-methylcytidine-3'-phosphate
  modified_base 21: mod_base = OTHER; note = 2'-O-methyluridine-3'-phosphorothioate
  modified_base 22: mod_base = OTHER; note = 2'-O-methylguanosine-3'-phosphorothioate
  modified_base 23: mod_base = OTHER; note = 2'-O-methyladenosine
attgtgtattatctccaaactga

SEQ ID NO: 307 - RNA, 23 nt, synthetic construct
  source 1..23: mol_type = other RNA
  modified_base 1: mod_base = OTHER; note = 2'-O-methyladenosine-3'-phosphorothioate
  modified_base 2: mod_base = OTHER; note = 2'-deoxy-2'-fluoroguanosine-3'-phosphorothioate
  modified_base 3: mod_base = OTHER; note = 2'-O-methylcytidine-3'-phosphate
  modified_base 4: mod_base = OTHER; note = 2'-O-methylguanosine-3'-phosphate
  modified_base 5: mod_base = OTHER; note = 2'-O-methyladenosine-3'-phosphate
  modified_base 6: mod_base = OTHER; note = 2'-deoxy-2'-fluoroguanosine-3'-phosphate
  modified_base 7: mod_base = OTHER; note = 2'-O-methyladenosine-3'-phosphate
  modified_base 8: mod_base = OTHER; note = 2'-deoxy-2'-fluorouridine-3'-phosphate
  modified_base 9: mod_base = OTHER; note = 2'-deoxy-2'-fluorocytidine-3'-phosphate
  modified_base 10: mod_base = OTHER; note = 2'-O-methyladenosine-3'-phosphate
  modified_base 11: mod_base = OTHER; note = 2'-O-methylcytidine-3'-phosphate
  modified_base 12: mod_base = OTHER; note = 2'-O-methyladenosine-3'-phosphate
  modified_base 13: mod_base = OTHER; note = 2'-O-methylguanosine-3'-phosphate
  modified_base 14: mod_base = OTHER; note = 2'-deoxy-2'-fluoroadenosine-3'-phosphate
  modified_base 15: mod_base = OTHER; note = 2'-O-methyladenosine-3'-phosphate
  modified_base 16: mod_base = OTHER; note = 2'-deoxy-2'-fluorouridine-3'-phosphate
  modified_base 17: mod_base = OTHER; note = 2'-O-methylcytidine-3'-phosphate
  modified_base 18: mod_base = OTHER; note = 2'-O-methyluridine-3'-phosphate
  modified_base 19: mod_base = OTHER; note = 2'-O-methyluridine-3'-phosphate
  modified_base 20: mod_base = OTHER; note = 2'-O-methylcytidine-3'-phosphate
  modified_base 21: mod_base = OTHER; note = 2'-O-methylguanosine-3'-phosphorothioate
  modified_base 22: mod_base = OTHER; note = 2'-O-methyladenosine-3'-phosphorothioate
  modified_base 23: mod_base = OTHER; note = 2'-O-methyladenosine
agcgagatcacagaatcttcgaa

SEQ ID NO: 308 - RNA, 23 nt, synthetic construct
  source 1..23: mol_type = other RNA
  modified_base 1: mod_base = OTHER; note = 2'-O-methyladenosine-3'-phosphorothioate
  modified_base 2: mod_base = OTHER; note = 2'-deoxy-2'-fluorouridine-3'-phosphorothioate
  modified_base 3: mod_base = OTHER; note = 2'-O-methyluridine-3'-phosphate
  modified_base 4: mod_base = OTHER; note = 2'-O-methylcytidine-3'-phosphate
  modified_base 5: mod_base = OTHER; note = 2'-O-methyladenosine-3'-phosphate
  modified_base 6: mod_base = OTHER; note = 2'-deoxy-2'-fluoroguanosine-3'-phosphate
  modified_base 7: mod_base = OTHER; note = 2'-O-methyluridine-3'-phosphate
  modified_base 8: mod_base = OTHER; note = 2'-deoxy-2'-fluorocytidine-3'-phosphate
  modified_base 9: mod_base = OTHER; note = 2'-deoxy-2'-fluoroadenosine-3'-phosphate
  modified_base 10: mod_base = OTHER; note = 2'-O-methyladenosine-3'-phosphate
  modified_base 11: mod_base = OTHER; note = 2'-O-methyluridine-3'-phosphate
  modified_base 12: mod_base = OTHER; note = 2'-O-methylcytidine-3'-phosphate
  modified_base 13: mod_base = OTHER; note = 2'-O-methylcytidine-3'-phosphate
  modified_base 14: mod_base = OTHER; note = 2'-deoxy-2'-fluorouridine-3'-phosphate
  modified_base 15: mod_base = OTHER; note = 2'-O-methylguanosine-3'-phosphate
  modified_base 16: mod_base = OTHER; note = 2'-deoxy-2'-fluorouridine-3'-phosphate
  modified_base 17: mod_base = OTHER; note = 2'-O-methyladenosine-3'-phosphate
  modified_base 18: mod_base = OTHER; note = 2'-O-methyladenosine-3'-phosphate
  modified_base 19: mod_base = OTHER; note = 2'-O-methyluridine-3'-phosphate
  modified_base 20: mod_base = OTHER; note = 2'-O-methylguanosine-3'-phosphate
  modified_base 21: mod_base = OTHER; note = 2'-O-methylcytidine-3'-phosphorothioate
  modified_base 22: mod_base = OTHER; note = 2'-O-methyluridine-3'-phosphorothioate
  modified_base 23: mod_base = OTHER; note = 2'-O-methyluridine
attcagtcaatcctgtaatgctt

SEQ ID NO: 309 - RNA, 23 nt, synthetic construct
  source 1..23: mol_type = other RNA
  modified_base 1: mod_base = OTHER; note = 2'-O-methyladenosine-3'-phosphorothioate
  modified_base 2: mod_base = OTHER; note = 2'-deoxy-2'-fluorouridine-3'-phosphorothioate
  modified_base 3: mod_base = OTHER; note = 2'-O-methyladenosine-3'-phosphate
  modified_base 4: mod_base = OTHER; note = 2'-O-methyluridine-3'-phosphate
  modified_base 5: mod_base = OTHER; note = 2'-O-methyluridine-3'-phosphate
  modified_base 6: mod_base = OTHER; note = 2'-deoxy-2'-fluoroadenosine-3'-phosphate
  modified_base 7: mod_base = OTHER; note = 2'-O-methyluridine-3'-phosphate
  modified_base 8: mod_base = OTHER; note = 2'-deoxy-2'-fluorocytidine-3'-phosphate
  modified_base 9: mod_base = OTHER; note = 2'-deoxy-2'-fluorouridine-3'-phosphate
  modified_base 10: mod_base = OTHER; note = 2'-O-methylcytidine-3'-phosphate
  modified_base 11: mod_base = OTHER; note = 2'-O-methylcytidine-3'-phosphate
  modified_base 12: mod_base = OTHER; note = 2'-O-methyladenosine-3'-phosphate
  modified_base 13: mod_base = OTHER; note = 2'-O-methyladenosine-3'-phosphate
  modified_base 14: mod_base = OTHER; note = 2'-deoxy-2'-fluoroadenosine-3'-phosphate
  modified_base 15: mod_base = OTHER; note = 2'-O-methylcytidine-3'-phosphate
  modified_base 16: mod_base = OTHER; note = 2'-deoxy-2'-fluorouridine-3'-phosphate
  modified_base 17: mod_base = OTHER; note = 2'-O-methylguanosine-3'-phosphate
  modified_base 18: mod_base = OTHER; note = 2'-O-methyladenosine-3'-phosphate
  modified_base 19: mod_base = OTHER; note = 2'-O-methyluridine-3'-phosphate
  modified_base 20: mod_base = OTHER; note = 2'-O-methylguanosine-3'-phosphate
  modified_base 21: mod_base = OTHER; note = 2'-O-methyladenosine-3'-phosphorothioate
  modified_base 22: mod_base = OTHER; note = 2'-O-methyladenosine-3'-phosphorothioate
  modified_base 23: mod_base = OTHER; note = 2'-O-methylcytidine
atattatctccaaactgatgaac

SEQ ID NO: 310 - RNA, 23 nt, synthetic construct
  source 1..23: mol_type = other RNA
  modified_base 1: mod_base = OTHER; note = 2'-O-methyladenosine-3'-phosphorothioate
  modified_base 2: mod_base = OTHER; note = 2'-deoxy-2'-fluorouridine-3'-phosphorothioate
  modified_base 3: mod_base = OTHER; note = 2'-O-methylcytidine-3'-phosphate
  modified_base 4: mod_base = OTHER; note = 2'-O-methyluridine-3'-phosphate
  modified_base 5: mod_base = OTHER; note = 2'-O-methylguanosine-3'-phosphate
  modified_base 6: mod_base = OTHER; note = 2'-deoxy-2'-fluoroguanosine-3'-phosphate
  modified_base 7: mod_base = OTHER; note = 2'-O-methyladenosine-3'-phosphate
  modified_base 8: mod_base = OTHER; note = 2'-deoxy-2'-fluorouridine-3'-phosphate
  modified_base 9: mod_base = OTHER; note = 2'-deoxy-2'-fluoroadenosine-3'-phosphate
  modified_base 10: mod_base = OTHER; note = 2'-O-methylguanosine-3'-phosphate
  modified_base 11: mod_base = OTHER; note = 2'-O-methyladenosine-3'-phosphate
  modified_base 12: mod_base = OTHER; note = 2'-O-methylguanosine-3'-phosphate
  modified_base 13: mod_base = OTHER; note = 2'-O-methylguanosine-3'-phosphate
  modified_base 14: mod_base = OTHER; note = 2'-deoxy-2'-fluoroadenosine-3'-phosphate
  modified_base 15: mod_base = OTHER; note = 2'-O-methyluridine-3'-phosphate
  modified_base 16: mod_base = OTHER; note = 2'-deoxy-2'-fluorouridine-3'-phosphate
  modified_base 17: mod_base = OTHER; note = 2'-O-methyladenosine-3'-phosphate
  modified_base 18: mod_base = OTHER; note = 2'-O-methyladenosine-3'-phosphate
  modified_base 19: mod_base = OTHER; note = 2'-O-methyladenosine-3'-phosphate
  modified_base 20: mod_base = OTHER; note = 2'-O-methylguanosine-3'-phosphate
  modified_base 21: mod_base = OTHER; note = 2'-O-methyluridine-3'-phosphorothioate
  modified_base 22: mod_base = OTHER; note = 2'-O-methylguanosine-3'-phosphorothioate
  modified_base 23: mod_base = OTHER; note = 2'-O-methyladenosine
atctggatagaggattaaagtga

SEQ ID NO: 311 - RNA, 23 nt, synthetic construct
  source 1..23: mol_type = other RNA
  modified_base 1: mod_base = OTHER; note = 2'-O-methyladenosine-3'-phosphorothioate
  modified_base 2: mod_base = OTHER; note = 2'-deoxy-2'-fluoroadenosine-3'-phosphorothioate
  modified_base 3: mod_base = OTHER; note = 2'-O-methylguanosine-3'-phosphate
  modified_base 4: mod_base = OTHER; note = 2'-O-methylcytidine-3'-phosphate
  modified_base 5: mod_base = OTHER; note = 2'-O-methylguanosine-3'-phosphate
  modified_base 6: mod_base = OTHER; note = 2'-deoxy-2'-fluorouridine-3'-phosphate
  modified_base 7: mod_base = OTHER; note = 2'-O-methyluridine-3'-phosphate
  modified_base 8: mod_base = OTHER; note = 2'-deoxy-2'-fluorouridine-3'-phosphate
  modified_base 9: mod_base = OTHER; note = 2'-deoxy-2'-fluorocytidine-3'-phosphate
  modified_base 10: mod_base = OTHER; note = 2'-O-methylcytidine-3'-phosphate
  modified_base 11: mod_base = OTHER; note = 2'-O-methyluridine-3'-phosphate
  modified_base 12: mod_base = OTHER; note = 2'-O-methylguanosine-3'-phosphate
  modified_base 13: mod_base = OTHER; note = 2'-O-methyluridine-3'-phosphate
  modified_base 14: mod_base = OTHER; note = 2'-deoxy-2'-fluorocytidine-3'-phosphate
  modified_base 15: mod_base = OTHER; note = 2'-O-methyluridine-3'-phosphate
  modified_base 16: mod_base = OTHER; note = 2'-deoxy-2'-fluorouridine-3'-phosphate
  modified_base 17: mod_base = OTHER; note = 2'-O-methyluridine-3'-phosphate
  modified_base 18: mod_base = OTHER; note = 2'-O-methyluridine-3'-phosphate
  modified_base 19: mod_base = OTHER; note = 2'-O-methyluridine-3'-phosphate
  modified_base 20: mod_base = OTHER; note = 2'-O-methyladenosine-3'-phosphate
  modified_base 21: mod_base = OTHER; note = 2'-O-methylcytidine-3'-phosphorothioate
  modified_base 22: mod_base = OTHER; note = 2'-O-methyluridine-3'-phosphorothioate
  modified_base 23: mod_base = OTHER; note = 2'-O-methyluridine
aagcgtttcctgtctttttactt

SEQ ID NO: 312 - RNA, 23 nt, synthetic construct
  source 1..23: mol_type = other RNA
  modified_base 1: mod_base = OTHER; note = 2'-O-methyluridine-3'-phosphorothioate
  modified_base 2: mod_base = OTHER; note = 2'-deoxy-2'-fluorouridine-3'-phosphorothioate
  modified_base 3: mod_base = OTHER; note = 2'-O-methylcytidine-3'-phosphate
  modified_base 4: mod_base = OTHER; note = 2'-O-methylcytidine-3'-phosphate
  modified_base 5: mod_base = OTHER; note = 2'-O-methyluridine-3'-phosphate
  modified_base 6: mod_base = OTHER; note = 2'-deoxy-2'-fluorouridine-3'-phosphate
  modified_base 7: mod_base = OTHER; note = 2'-O-methylcytidine-3'-phosphate
  modified_base 8: mod_base = OTHER; note = 2'-deoxy-2'-fluorouridine-3'-phosphate
  modified_base 9: mod_base = OTHER; note = 2'-deoxy-2'-fluoroguanosine-3'-phosphate
  modified_base 10: mod_base = OTHER; note = 2'-O-methylcytidine-3'-phosphate
  modified_base 11: mod_base = OTHER; note = 2'-O-methyluridine-3'-phosphate
  modified_base 12: mod_base = OTHER; note = 2'-O-methylcytidine-3'-phosphate
  modified_base 13: mod_base = OTHER; note = 2'-O-methylguanosine-3'-phosphate
  modified_base 14: mod_base = OTHER; note = 2'-deoxy-2'-fluoroadenosine-3'-phosphate
  modified_base 15: mod_base = OTHER; note = 2'-O-methyladenosine-3'-phosphate
  modified_base 16: mod_base = OTHER; note = 2'-deoxy-2'-fluoroadenosine-3'-phosphate
  modified_base 17: mod_base = OTHER; note = 2'-O-methyluridine-3'-phosphate
  modified_base 18: mod_base = OTHER; note = 2'-O-methyluridine-3'-phosphate
  modified_base 19: mod_base = OTHER; note = 2'-O-methylguanosine-3'-phosphate
  modified_base 20: mod_base = OTHER; note = 2'-O-methyladenosine-3'-phosphate
  modified_base 21: mod_base = OTHER; note = 2'-O-methyluridine-3'-phosphorothioate
  modified_base 22: mod_base = OTHER; note = 2'-O-methylguanosine-3'-phosphorothioate
  modified_base 23: mod_base = OTHER; note = 2'-O-methylguanosine
ttccttctgctcgaaattgatgg

SEQ ID NO: 313 - RNA, 23 nt, synthetic construct
  source 1..23: mol_type = other RNA
  modified_base 1: mod_base = OTHER; note = 2'-O-methyladenosine-3'-phosphorothioate
  modified_base 2: mod_base = OTHER; note = 2'-deoxy-2'-fluoroadenosine-3'-phosphorothioate
  modified_base 3: mod_base = OTHER; note = 2'-O-methyluridine-3'-phosphate
  modified_base 4: mod_base = OTHER; note = 2'-O-methyladenosine-3'-phosphate
  modified_base 5: mod_base = OTHER; note = 2'-O-methylguanosine-3'-phosphate
  modified_base 6: mod_base = OTHER; note = 2'-deoxy-2'-fluoroadenosine-3'-phosphate
  modified_base 7: mod_base = OTHER; note = 2'-O-methylguanosine-3'-phosphate
  modified_base 8: mod_base = OTHER; note = 2'-deoxy-2'-fluoroguanosine-3'-phosphate
  modified_base 9: mod_base = OTHER; note = 2'-deoxy-2'-fluoroadenosine-3'-phosphate
  modified_base 10: mod_base = OTHER; note = 2'-O-methyluridine-3'-phosphate
  modified_base 11: mod_base = OTHER; note = 2'-O-methyluridine-3'-phosphate
  modified_base 12: mod_base = OTHER; note = 2'-O-methyladenosine-3'-phosphate
  modified_base 13: mod_base = OTHER; note = 2'-O-methyladenosine-3'-phosphate
  modified_base 14: mod_base = OTHER; note = 2'-deoxy-2'-fluoroadenosine-3'-phosphate
  modified_base 15: mod_base = OTHER; note = 2'-O-methylguanosine-3'-phosphate
  modified_base 16: mod_base = OTHER; note = 2'-deoxy-2'-fluorouridine-3'-phosphate
  modified_base 17: mod_base = OTHER; note = 2'-O-methylguanosine-3'-phosphate
  modified_base 18: mod_base = OTHER; note = 2'-O-methyladenosine-3'-phosphate
  modified_base 19: mod_base = OTHER; note = 2'-O-methylguanosine-3'-phosphate
  modified_base 20: mod_base = OTHER; note = 2'-O-methylguanosine-3'-phosphate
  modified_base 21: mod_base = OTHER; note = 2'-O-methyladenosine-3'-phosphorothioate
  modified_base 22: mod_base = OTHER; note = 2'-O-methylcytidine-3'-phosphorothioate
  modified_base 23: mod_base = OTHER; note = 2'-O-methylcytidine
aatagaggattaaagtgaggacc

SEQ ID NO: 314 - RNA, 23 nt, synthetic construct
  source 1..23: mol_type = other RNA
  modified_base 1: mod_base = OTHER; note = 2'-O-methyladenosine-3'-phosphorothioate
  modified_base 2: mod_base = OTHER; note = 2'-deoxy-2'-fluorouridine-3'-phosphorothioate
  modified_base 3: mod_base = OTHER; note = 2'-O-methyladenosine-3'-phosphate
  modified_base 4: mod_base = OTHER; note = 2'-O-methylguanosine-3'-phosphate
  modified_base 5: mod_base = OTHER; note = 2'-O-methyladenosine-3'-phosphate
  modified_base 6: mod_base = OTHER; note = 2'-deoxy-2'-fluoroguanosine-3'-phosphate
  modified_base 7: mod_base = OTHER; note = 2'-O-methylguanosine-3'-phosphate
  modified_base 8: mod_base = OTHER; note = 2'-deoxy-2'-fluoroadenosine-3'-phosphate
  modified_base 9: mod_base = OTHER; note = 2'-deoxy-2'-fluorouridine-3'-phosphate
  modified_base 10: mod_base = OTHER; note = 2'-O-methyluridine-3'-phosphate
  modified_base 11: mod_base = OTHER; note = 2'-O-methyladenosine-3'-phosphate
  modified_base 12: mod_base = OTHER; note = 2'-O-methyladenosine-3'-phosphate
  modified_base 13: mod_base = OTHER; note = 2'-O-methyladenosine-3'-phosphate
  modified_base 14: mod_base = OTHER; note = 2'-deoxy-2'-fluoroguanosine-3'-phosphate
  modified_base 15: mod_base = OTHER; note = 2'-O-methyluridine-3'-phosphate
  modified_base 16: mod_base = OTHER; note = 2'-deoxy-2'-fluoroguanosine-3'-phosphate
  modified_base 17: mod_base = OTHER; note = 2'-O-methyladenosine-3'-phosphate
  modified_base 18: mod_base = OTHER; note = 2'-O-methylguanosine-3'-phosphate
  modified_base 19: mod_base = OTHER; note = 2'-O-methylguanosine-3'-phosphate
  modified_base 20: mod_base = OTHER; note = 2'-O-methyladenosine-3'-phosphate
  modified_base 21: mod_base = OTHER; note = 2'-O-methylcytidine-3'-phosphorothioate
  modified_base 22: mod_base = OTHER; note = 2'-O-methylcytidine-3'-phosphorothioate
  modified_base 23: mod_base = OTHER; note = 2'-O-methyluridine
atagaggattaaagtgaggacct

SEQ ID NO: 315 - RNA, 23 nt, synthetic construct
  source 1..23: mol_type = other RNA
  modified_base 1: mod_base = OTHER; note = 2'-O-methyluridine-3'-phosphorothioate
  modified_base 2: mod_base = OTHER; note = 2'-deoxy-2'-fluoroguanosine-3'-phosphorothioate
  modified_base 3: mod_base = OTHER; note = 2'-O-methyluridine-3'-phosphate
  modified_base 4: mod_base = OTHER; note = 2'-O-methyladenosine-3'-phosphate
  modified_base 5: mod_base = OTHER; note = 2'-O-methyluridine-3'-phosphate
  modified_base 6: mod_base = OTHER; note = 2'-deoxy-2'-fluorouridine-3'-phosphate
  modified_base 7: mod_base = OTHER; note = 2'-O-methyladenosine-3'-phosphate
  modified_base 8: mod_base = OTHER; note = 2'-deoxy-2'-fluorouridine-3'-phosphate
  modified_base 9: mod_base = OTHER; note = 2'-deoxy-2'-fluorocytidine-3'-phosphate
  modified_base 10: mod_base = OTHER; note = 2'-O-methyluridine-3'-phosphate
  modified_base 11: mod_base = OTHER; note = 2'-O-methylcytidine-3'-phosphate
  modified_base 12: mod_base = OTHER; note = 2'-O-methylcytidine-3'-phosphate
  modified_base 13: mod_base = OTHER; note = 2'-O-methyladenosine-3'-phosphate
  modified_base 14: mod_base = OTHER; note = 2'-deoxy-2'-fluoroadenosine-3'-phosphate
  modified_base 15: mod_base = OTHER; note = 2'-O-methyladenosine-3'-phosphate
  modified_base 16: mod_base = OTHER; note = 2'-deoxy-2'-fluorocytidine-3'-phosphate
  modified_base 17: mod_base = OTHER; note = 2'-O-methyluridine-3'-phosphate
  modified_base 18: mod_base = OTHER; note = 2'-O-methylguanosine-3'-phosphate
  modified_base 19: mod_base = OTHER; note = 2'-O-methyladenosine-3'-phosphate
  modified_base 20: mod_base = OTHER; note = 2'-O-methyluridine-3'-phosphate
  modified_base 21: mod_base = OTHER; note = 2'-O-methylguanosine-3'-phosphorothioate
  modified_base 22: mod_base = OTHER; note = 2'-O-methyladenosine-3'-phosphorothioate
  modified_base 23: mod_base = OTHER; note = 2'-O-methyladenosine
tgtattatctccaaactgatgaa

SEQ ID NO: 316 - RNA, 23 nt, synthetic construct
  source 1..23: mol_type = other RNA
  modified_base 1: mod_base = OTHER; note = 2'-O-methyladenosine-3'-phosphorothioate
  modified_base 2: mod_base = OTHER; note = 2'-deoxy-2'-fluorocytidine-3'-phosphorothioate
  modified_base 3: mod_base = OTHER; note = 2'-O-methylguanosine-3'-phosphate
  modified_base 4: mod_base = OTHER; note = 2'-O-methyluridine-3'-phosphate
  modified_base 5: mod_base = OTHER; note = 2'-O-methyluridine-3'-phosphate
  modified_base 6: mod_base = OTHER; note = 2'-deoxy-2'-fluorouridine-3'-phosphate
  modified_base 7: mod_base = OTHER; note = 2'-O-methylcytidine-3'-phosphate
  modified_base 8: mod_base = OTHER; note = 2'-deoxy-2'-fluorocytidine-3'-phosphate
  modified_base 9: mod_base = OTHER; note = 2'-deoxy-2'-fluorouridine-3'-phosphate
  modified_base 10: mod_base = OTHER; note = 2'-O-methylguanosine-3'-phosphate
  modified_base 11: mod_base = OTHER; note = 2'-O-methyluridine-3'-phosphate
  modified_base 12: mod_base = OTHER; note = 2'-O-methylcytidine-3'-phosphate
  modified_base 13: mod_base = OTHER; note = 2'-O-methyluridine-3'-phosphate
  modified_base 14: mod_base = OTHER; note = 2'-deoxy-2'-fluorouridine-3'-phosphate
  modified_base 15: mod_base = OTHER; note = 2'-O-methyluridine-3'-phosphate
  modified_base 16: mod_base = OTHER; note = 2'-deoxy-2'-fluorouridine-3'-phosphate
  modified_base 17: mod_base = OTHER; note = 2'-O-methyluridine-3'-phosphate
  modified_base 18: mod_base = OTHER; note = 2'-O-methyladenosine-3'-phosphate
  modified_base 19: mod_base = OTHER; note = 2'-O-methylcytidine-3'-phosphate
  modified_base 20: mod_base = OTHER; note = 2'-O-methyluridine-3'-phosphate
  modified_base 21: mod_base = OTHER; note = 2'-O-methyluridine-3'-phosphorothioate
  modified_base 22: mod_base = OTHER; note = 2'-O-methyluridine-3'-phosphorothioate
  modified_base 23: mod_base = OTHER; note = 2'-O-methylcytidine
acgtttcctgtctttttactttc

SEQ ID NO: 317 - RNA, 23 nt, synthetic construct
  source 1..23: mol_type = other RNA
  modified_base 1: mod_base = OTHER; note = 2'-O-methyluridine-3'-phosphorothioate
  modified_base 2: mod_base = OTHER; note = 2'-deoxy-2'-fluorouridine-3'-phosphorothioate
  modified_base 3: mod_base = OTHER; note = 2'-O-methylcytidine-3'-phosphate
  modified_base 4: mod_base = OTHER; note = 2'-O-methyladenosine-3'-phosphate
  modified_base 5: mod_base = OTHER; note = 2'-O-methylguanosine-3'-phosphate
  modified_base 6: mod_base = OTHER; note = 2'-deoxy-2'-fluorouridine-3'-phosphate
  modified_base 7: mod_base = OTHER; note = 2'-O-methylcytidine-3'-phosphate
  modified_base 8: mod_base = OTHER; note = 2'-deoxy-2'-fluoroadenosine-3'-phosphate
  modified_base 9: mod_base = OTHER; note = 2'-deoxy-2'-fluoroadenosine-3'-phosphate
  modified_base 10: mod_base = OTHER; note = 2'-O-methyluridine-3'-phosphate
  modified_base 11: mod_base = OTHER; note = 2'-O-methylcytidine-3'-phosphate
  modified_base 12: mod_base = OTHER; note = 2'-O-methylcytidine-3'-phosphate
  modified_base 13: mod_base = OTHER; note = 2'-O-methyluridine-3'-phosphate
  modified_base 14: mod_base = OTHER; note = 2'-deoxy-2'-fluoroguanosine-3'-phosphate
  modified_base 15: mod_base = OTHER; note = 2'-O-methyluridine-3'-phosphate
  modified_base 16: mod_base = OTHER; note = 2'-deoxy-2'-fluoroadenosine-3'-phosphate
  modified_base 17: mod_base = OTHER; note = 2'-O-methyladenosine-3'-phosphate
  modified_base 18: mod_base = OTHER; note = 2'-O-methyluridine-3'-phosphate
  modified_base 19: mod_base = OTHER; note = 2'-O-methylguanosine-3'-phosphate
  modified_base 20: mod_base = OTHER; note = 2'-O-methylcytidine-3'-phosphate
  modified_base 21: mod_base = OTHER; note = 2'-O-methyluridine-3'-phosphorothioate
  modified_base 22: mod_base = OTHER; note = 2'-O-methyluridine-3'-phosphorothioate
  modified_base 23: mod_base = OTHER; note = 2'-O-methylcytidine
ttcagtcaatcctgtaatgcttc

SEQ ID NO: 318 - RNA, 23 nt, synthetic construct
  source 1..23: mol_type = other RNA
  modified_base 1: mod_base = OTHER; note = 2'-O-methyladenosine-3'-phosphorothioate
  modified_base 2: mod_base = OTHER; note = 2'-deoxy-2'-fluorouridine-3'-phosphorothioate
  modified_base 3: mod_base = OTHER; note = 2'-O-methylguanosine-3'-phosphate
  modified_base 4: mod_base = OTHER; note = 2'-O-methyladenosine-3'-phosphate
  modified_base 5: mod_base = OTHER; note = 2'-O-methylguanosine-3'-phosphate
  modified_base 6: mod_base = OTHER; note = 2'-deoxy-2'-fluoroadenosine-3'-phosphate
  modified_base 7: mod_base = OTHER; note = 2'-O-methylguanosine-3'-phosphate
  modified_base 8: mod_base = OTHER; note = 2'-deoxy-2'-fluorocytidine-3'-phosphate
  modified_base 9: mod_base = OTHER; note = 2'-deoxy-2'-fluoroguanosine-3'-phosphate
  modified_base 10: mod_base = OTHER; note = 2'-O-methyladenosine-3'-phosphate
  modified_base 11: mod_base = OTHER; note = 2'-O-methylguanosine-3'-phosphate
  modified_base 12: mod_base = OTHER; note = 2'-O-methyladenosine-3'-phosphate
  modified_base 13: mod_base = OTHER; note = 2'-O-methyluridine-3'-phosphate
  modified_base 14: mod_base = OTHER; note = 2'-deoxy-2'-fluorocytidine-3'-phosphate
  modified_base 15: mod_base = OTHER; note = 2'-O-methyladenosine-3'-phosphate
  modified_base 16: mod_base = OTHER; note = 2'-deoxy-2'-fluorocytidine-3'-phosphate
  modified_base 17: mod_base = OTHER; note = 2'-O-methyladenosine-3'-phosphate
  modified_base 18: mod_base = OTHER; note = 2'-O-methylguanosine-3'-phosphate
  modified_base 19: mod_base = OTHER; note = 2'-O-methyladenosine-3'-phosphate
  modified_base 20: mod_base = OTHER; note = 2'-O-methyladenosine-3'-phosphate
  modified_base 21: mod_base = OTHER; note = 2'-O-methyluridine-3'-phosphorothioate
  modified_base 22: mod_base = OTHER; note = 2'-O-methylcytidine-3'-phosphorothioate
  modified_base 23: mod_base = OTHER; note = 2'-O-methyluridine
atgagagcgagatcacagaatct

SEQ ID NO: 319 - RNA, 23 nt, synthetic construct
  source 1..23: mol_type = other RNA
  modified_base 1: mod_base = OTHER; note = 2'-O-methyladenosine-3'-phosphorothioate
  modified_base 2: mod_base = OTHER; note = 2'-deoxy-2'-fluorouridine-3'-phosphorothioate
  modified_base 3: mod_base = OTHER; note = 2'-O-methyluridine-3'-phosphate
  modified_base 4: mod_base = OTHER; note = 2'-O-methyladenosine-3'-phosphate
  modified_base 5: mod_base = OTHER; note = 2'-O-methyluridine-3'-phosphate
  modified_base 6: mod_base = OTHER; note = 2'-deoxy-2'-fluorocytidine-3'-phosphate
  modified_base 7: mod_base = OTHER; note = 2'-O-methyluridine-3'-phosphate
  modified_base 8: mod_base = OTHER; note = 2'-deoxy-2'-fluorocytidine-3'-phosphate
  modified_base 9: mod_base = OTHER; note = 2'-deoxy-2'-fluorocytidine-3'-phosphate
  modified_base 10: mod_base = OTHER; note = 2'-O-methyladenosine-3'-phosphate
  modified_base 11: mod_base = OTHER; note = 2'-O-methyladenosine-3'-phosphate
  modified_base 12: mod_base = OTHER; note = 2'-O-methyladenosine-3'-phosphate
  modified_base 13: mod_base = OTHER; note = 2'-O-methylcytidine-3'-phosphate
  modified_base 14: mod_base = OTHER; note = 2'-deoxy-2'-fluorouridine-3'-phosphate
  modified_base 15: mod_base = OTHER; note = 2'-O-methylguanosine-3'-phosphate
  modified_base 16: mod_base = OTHER; note = 2'-deoxy-2'-fluoroadenosine-3'-phosphate
  modified_base 17: mod_base = OTHER; note = 2'-O-methyluridine-3'-phosphate
  modified_base 18: mod_base = OTHER; note = 2'-O-methylguanosine-3'-phosphate
  modified_base 19: mod_base = OTHER; note = 2'-O-methyladenosine-3'-phosphate
  modified_base 20: mod_base = OTHER; note = 2'-O-methyladenosine-3'-phosphate
  modified_base 21: mod_base = OTHER; note = 2'-O-methylcytidine-3'-phosphorothioate
  modified_base 22: mod_base = OTHER; note = 2'-O-methyladenosine-3'-phosphorothioate
  modified_base 23: mod_base = OTHER; note = 2'-O-methyluridine
attatctccaaactgatgaacat

SEQ ID NO: 320 - RNA, 23 nt, synthetic construct
  source 1..23: mol_type = other RNA
  modified_base 1: mod_base = OTHER; note = 2'-O-methyluridine-3'-phosphorothioate
  modified_base 2: mod_base = OTHER; note = 2'-deoxy-2'-fluorocytidine-3'-phosphorothioate
  modified_base 3: mod_base = OTHER; note = 2'-O-methyluridine-3'-phosphate
  modified_base 4: mod_base = OTHER; note = 2'-O-methylguanosine-3'-phosphate
  modified_base 5: mod_base = OTHER; note = 2'-O-methylguanosine-3'-phosphate
  modified_base 6: mod_base = OTHER; note = 2'-deoxy-2'-fluoroadenosine-3'-phosphate
  modified_base 7: mod_base = OTHER; note = 2'-O-methyluridine-3'-phosphate
  modified_base 8: mod_base = OTHER; note = 2'-deoxy-2'-fluoroadenosine-3'-phosphate
  modified_base 9: mod_base = OTHER; note = 2'-deoxy-2'-fluoroguanosine-3'-phosphate
  modified_base 10: mod_base = OTHER; note = 2'-O-methyladenosine-3'-phosphate
  modified_base 11: mod_base = OTHER; note = 2'-O-methylguanosine-3'-phosphate
  modified_base 12: mod_base = OTHER; note = 2'-O-methylguanosine-3'-phosphate
  modified_base 13: mod_base = OTHER; note = 2'-O-methyladenosine-3'-phosphate
  modified_base 14: mod_base = OTHER; note = 2'-deoxy-2'-fluorouridine-3'-phosphate
  modified_base 15: mod_base = OTHER; note = 2'-O-methyluridine-3'-phosphate
  modified_base 16: mod_base = OTHER; note = 2'-deoxy-2'-fluoroadenosine-3'-phosphate
  modified_base 17: mod_base = OTHER; note = 2'-O-methyladenosine-3'-phosphate
  modified_base 18: mod_base = OTHER; note = 2'-O-methyladenosine-3'-phosphate
  modified_base 19: mod_base = OTHER; note = 2'-O-methylguanosine-3'-phosphate
  modified_base 20: mod_base = OTHER; note = 2'-O-methyluridine-3'-phosphate
  modified_base 21: mod_base = OTHER; note = 2'-O-methylguanosine-3'-phosphorothioate
  modified_base 22: mod_base = OTHER; note = 2'-O-methyladenosine-3'-phosphorothioate
  modified_base 23: mod_base = OTHER; note = 2'-O-methylguanosine
tctggatagaggattaaagtgag

SEQ ID NO: 321 - RNA, 23 nt, synthetic construct
  source 1..23: mol_type = other RNA
  modified_base 1: mod_base = OTHER; note = 2'-O-methyladenosine-3'-phosphorothioate
  modified_base 2: mod_base = OTHER; note = 2'-deoxy-2'-fluoroadenosine-3'-phosphorothioate
  modified_base 3: mod_base = OTHER; note = 2'-O-methylcytidine-3'-phosphate
  modified_base 4: mod_base = OTHER; note = 2'-O-methyladenosine-3'-phosphate
  modified_base 5: mod_base = OTHER; note = 2'-O-methylguanosine-3'-phosphate
  modified_base 6: mod_base = OTHER; note = 2'-deoxy-2'-fluoroadenosine-3'-phosphate
  modified_base 7: mod_base = OTHER; note = 2'-O-methyladenosine-3'-phosphate
  modified_base 8: mod_base = OTHER; note = 2'-deoxy-2'-fluorouridine-3'-phosphate
  modified_base 9: mod_base = OTHER; note = 2'-deoxy-2'-fluorocytidine-3'-phosphate
  modified_base 10: mod_base = OTHER; note = 2'-O-methyluridine-3'-phosphate
  modified_base 11: mod_base = OTHER; note = 2'-O-methyluridine-3'-phosphate
  modified_base 12: mod_base = OTHER; note = 2'-O-methylcytidine-3'-phosphate
  modified_base 13: mod_base = OTHER; note = 2'-O-methylguanosine-3'-phosphate
  modified_base 14: mod_base = OTHER; note = 2'-deoxy-2'-fluoroadenosine-3'-phosphate
  modified_base 15: mod_base = OTHER; note = 2'-O-methyladenosine-3'-phosphate
  modified_base 16: mod_base = OTHER; note = 2'-deoxy-2'-fluoroadenosine-3'-phosphate
  modified_base 17: mod_base = OTHER; note = 2'-O-methylguanosine-3'-phosphate
  modified_base 18: mod_base = OTHER; note = 2'-O-methyladenosine-3'-phosphate
  modified_base 19: mod_base = OTHER; note = 2'-O-methylcytidine-3'-phosphate
  modified_base 20: mod_base = OTHER; note = 2'-O-methyladenosine-3'-phosphate
  modified_base 21: mod_base = OTHER; note = 2'-O-methylcytidine-3'-phosphorothioate
  modified_base 22: mod_base = OTHER; note = 2'-O-methylcytidine-3'-phosphorothioate
  modified_base 23: mod_base = OTHER; note = 2'-O-methyluridine
aacagaatcttcgaaagacacct

SEQ ID NO: 322 - RNA, 23 nt, synthetic construct
  source 1..23: mol_type = other RNA
  modified_base 1: mod_base = OTHER; note = 2'-O-methyladenosine-3'-phosphorothioate
  modified_base 2: mod_base = OTHER; note = 2'-deoxy-2'-fluorocytidine-3'-phosphorothioate
  modified_base 3: mod_base = OTHER; note = 2'-O-methyladenosine-3'-phosphate
  modified_base 4: mod_base = OTHER; note = 2'-O-methyluridine-3'-phosphate
  modified_base 5: mod_base = OTHER; note = 2'-O-methyluridine-3'-phosphate
  modified_base 6: mod_base = OTHER; note = 2'-deoxy-2'-fluoroadenosine-3'-phosphate
  modified_base 7: mod_base = OTHER; note = 2'-O-methylcytidine-3'-phosphate
  modified_base 8: mod_base = OTHER; note = 2'-deoxy-2'-fluorouridine-3'-phosphate
  modified_base 9: mod_base = OTHER; note = 2'-deoxy-2'-fluorouridine-3'-phosphate
  modified_base 10: mod_base = OTHER; note = 2'-O-methyluridine-3'-phosphate
  modified_base 11: mod_base = OTHER; note = 2'-O-methylcytidine-3'-phosphate
  modified_base 12: mod_base = OTHER; note = 2'-O-methylcytidine-3'-phosphate
  modified_base 13: mod_base = OTHER; note = 2'-O-methyluridine-3'-phosphate
  modified_base 14: mod_base = OTHER; note = 2'-deoxy-2'-fluorouridine-3'-phosphate
  modified_base 15: mod_base = OTHER; note = 2'-O-methylcytidine-3'-phosphate
  modified_base 16: mod_base = OTHER; note = 2'-deoxy-2'-fluorouridine-3'-phosphate
  modified_base 17: mod_base = OTHER; note = 2'-O-methylguanosine-3'-phosphate
  modified_base 18: mod_base = OTHER; note = 2'-O-methylcytidine-3'-phosphate
  modified_base 19: mod_base = OTHER; note = 2'-O-methyluridine-3'-phosphate
  modified_base 20: mod_base = OTHER; note = 2'-O-methylcytidine-3'-phosphate
  modified_base 21: mod_base = OTHER; note = 2'-O-methylguanosine-3'-phosphorothioate
  modified_base 22: mod_base = OTHER; note = 2'-O-methyladenosine-3'-phosphorothioate
  modified_base 23: mod_base = OTHER; note = 2'-O-methyladenosine
acattactttccttctgctcgaa

SEQ ID NO: 323 - RNA, 23 nt, synthetic construct
  source 1..23: mol_type = other RNA
  modified_base 1: mod_base = OTHER; note = 2'-O-methyladenosine-3'-phosphorothioate
  modified_base 2: mod_base = OTHER; note = 2'-deoxy-2'-fluorouridine-3'-phosphorothioate
  modified_base 3: mod_base = OTHER; note = 2'-O-methylcytidine-3'-phosphate
  modified_base 4: mod_base = OTHER; note = 2'-O-methylcytidine-3'-phosphate
  modified_base 5: mod_base = OTHER; note = 2'-O-methyladenosine-3'-phosphate
  modified_base 6: mod_base = OTHER; note = 2'-deoxy-2'-fluoroadenosine-3'-phosphate
  modified_base 7: mod_base = OTHER; note = 2'-O-methyladenosine-3'-phosphate
  modified_base 8: mod_base = OTHER; note = 2'-deoxy-2'-fluorocytidine-3'-phosphate
  modified_base 9: mod_base = OTHER; note = 2'-deoxy-2'-fluorouridine-3'-phosphate
  modified_base 10: mod_base = OTHER; note = 2'-O-methylguanosine-3'-phosphate
  modified_base 11: mod_base = OTHER; note = 2'-O-methyladenosine-3'-phosphate
  modified_base 12: mod_base = OTHER; note = 2'-O-methyluridine-3'-phosphate
  modified_base 13: mod_base = OTHER; note = 2'-O-methylguanosine-3'-phosphate
  modified_base 14: mod_base = OTHER; note = 2'-deoxy-2'-fluoroadenosine-3'-phosphate
  modified_base 15: mod_base = OTHER; note = 2'-O-methyladenosine-3'-phosphate
  modified_base 16: mod_base = OTHER; note = 2'-deoxy-2'-fluorocytidine-3'-phosphate
  modified_base 17: mod_base = OTHER; note = 2'-O-methyladenosine-3'-phosphate
  modified_base 18: mod_base = OTHER; note = 2'-O-methyluridine-3'-phosphate
  modified_base 19: mod_base = OTHER; note = 2'-O-methylguanosine-3'-phosphate
  modified_base 20: mod_base = OTHER; note = 2'-O-methylguanosine-3'-phosphate
  modified_base 21: mod_base = OTHER; note = 2'-O-methyladenosine-3'-phosphorothioate
  modified_base 22: mod_base = OTHER; note = 2'-O-methyladenosine-3'-phosphorothioate
  modified_base 23: mod_base = OTHER; note = 2'-O-methyluridine
atccaaactgatgaacatggaat

SEQ ID NO: 324 - RNA, 23 nt, synthetic construct
  source 1..23: mol_type = other RNA
  modified_base 1: mod_base = OTHER; note = 2'-O-methyluridine-3'-phosphorothioate
  modified_base 2: mod_base = OTHER; note = 2'-deoxy-2'-fluoroadenosine-3'-phosphorothioate
  modified_base 3: mod_base = OTHER; note = 2'-O-methyladenosine-3'-phosphate
  modified_base 4: mod_base = OTHER; note = 2'-O-methyladenosine-3'-phosphate
  modified_base 5: mod_base = OTHER; note = 2'-O-methylguanosine-3'-phosphate
  modified_base 6: mod_base = OTHER; note = 2'-deoxy-2'-fluorouridine-3'-phosphate
  modified_base 7: mod_base = OTHER; note = 2'-O-methylguanosine-3'-phosphate
  modified_base 8: mod_base = OTHER; note = 2'-deoxy-2'-fluoroadenosine-3'-phosphate
  modified_base 9: mod_base = OTHER; note = 2'-deoxy-2'-fluoroguanosine-3'-phosphate
  modified_base 10: mod_base = OTHER; note = 2'-O-methylguanosine-3'-phosphate
  modified_base 11: mod_base = OTHER; note = 2'-O-methyladenosine-3'-phosphate
  modified_base 12: mod_base = OTHER; note = 2'-O-methylcytidine-3'-phosphate
  modified_base 13: mod_base = OTHER; note = 2'-O-methylcytidine-3'-phosphate
  modified_base 14: mod_base = OTHER; note = 2'-deoxy-2'-fluorouridine-3'-phosphate
  modified_base 15: mod_base = OTHER; note = 2'-O-methylguanosine-3'-phosphate
  modified_base 16: mod_base = OTHER; note = 2'-deoxy-2'-fluorocytidine-3'-phosphate
  modified_base 17: mod_base = OTHER; note = 2'-O-methyladenosine-3'-phosphate
  modified_base 18: mod_base = OTHER; note = 2'-O-methylcytidine-3'-phosphate
  modified_base 19: mod_base = OTHER; note = 2'-O-methyluridine-3'-phosphate
  modified_base 20: mod_base = OTHER; note = 2'-O-methylguanosine-3'-phosphate
  modified_base 21: mod_base = OTHER; note = 2'-O-methylguanosine-3'-phosphorothioate
  modified_base 22: mod_base = OTHER; note = 2'-O-methyluridine-3'-phosphorothioate
  modified_base 23: mod_base = OTHER; note = 2'-O-methyladenosine
taaagtgaggacctgcactggta

SEQ ID NO: 325 - RNA, 23 nt, synthetic construct
  source 1..23: mol_type = other RNA
  modified_base 1: mod_base = OTHER; note = 2'-O-methyladenosine-3'-phosphorothioate
  modified_base 2: mod_base = OTHER; note = 2'-deoxy-2'-fluoroguanosine-3'-phosphorothioate
  modified_base 3: mod_base = OTHER; note = 2'-O-methyladenosine-3'-phosphate
  modified_base 4: mod_base = OTHER; note = 2'-O-methylguanosine-3'-phosphate
  modified_base 5: mod_base = OTHER; note = 2'-O-methylguanosine-3'-phosphate
  modified_base 6: mod_base = OTHER; note = 2'-deoxy-2'-fluoroadenosine-3'-phosphate
  modified_base 7: mod_base = OTHER; note = 2'-O-methyluridine-3'-phosphate
  modified_base 8: mod_base = OTHER; note = 2'-deoxy-2'-fluorouridine-3'-phosphate
  modified_base 9: mod_base = OTHER; note = 2'-deoxy-2'-fluoroadenosine-3'-phosphate
  modified_base 10: mod_base = OTHER; note = 2'-O-methyladenosine-3'-phosphate
  modified_base 11: mod_base = OTHER; note = 2'-O-methyladenosine-3'-phosphate
  modified_base 12: mod_base = OTHER; note = 2'-O-methylguanosine-3'-phosphate
  modified_base 13: mod_base = OTHER; note = 2'-O-methyluridine-3'-phosphate
  modified_base 14: mod_base = OTHER; note = 2'-deoxy-2'-fluoroguanosine-3'-phosphate
  modified_base 15: mod_base = OTHER; note = 2'-O-methyladenosine-3'-phosphate
  modified_base 16: mod_base = OTHER; note = 2'-deoxy-2'-fluoroguanosine-3'-phosphate
  modified_base 17: mod_base = OTHER; note = 2'-O-methylguanosine-3'-phosphate
  modified_base 18: mod_base = OTHER; note = 2'-O-methyladenosine-3'-phosphate
  modified_base 19: mod_base = OTHER; note = 2'-O-methylcytidine-3'-phosphate
  modified_base 20: mod_base = OTHER; note = 2'-O-methylcytidine-3'-phosphate
  modified_base 21: mod_base = OTHER; note = 2'-O-methyluridine-3'-phosphorothioate
  modified_base 22: mod_base = OTHER; note = 2'-O-methylguanosine-3'-phosphorothioate
  modified_base 23: mod_base = OTHER; note = 2'-O-methylcytidine
agaggattaaagtgaggacctgc

SEQ ID NO: 326 - RNA, 23 nt, synthetic construct
  source 1..23: mol_type = other RNA
  modified_base 1: mod_base = OTHER; note = 2'-O-methyladenosine-3'-phosphorothioate
  modified_base 2: mod_base = OTHER; note = 2'-deoxy-2'-fluorouridine-3'-phosphorothioate
  modified_base 3: mod_base = OTHER; note = 2'-O-methylcytidine-3'-phosphate
  modified_base 4: mod_base = OTHER; note = 2'-O-methyluridine-3'-phosphate
  modified_base 5: mod_base = OTHER; note = 2'-O-methyluridine-3'-phosphate
  modified_base 6: mod_base = OTHER; note = 2'-deoxy-2'-fluorocytidine-3'-phosphate
  modified_base 7: mod_base = OTHER; note = 2'-O-methylguanosine-3'-phosphate
  modified_base 8: mod_base = OTHER; note = 2'-deoxy-2'-fluoroadenosine-3'-phosphate
  modified_base 9: mod_base = OTHER; note = 2'-deoxy-2'-fluoroadenosine-3'-phosphate
  modified_base 10: mod_base = OTHER; note = 2'-O-methyladenosine-3'-phosphate
  modified_base 11: mod_base = OTHER; note = 2'-O-methylguanosine-3'-phosphate
  modified_base 12: mod_base = OTHER; note = 2'-O-methyladenosine-3'-phosphate
  modified_base 13: mod_base = OTHER; note = 2'-O-methylcytidine-3'-phosphate
  modified_base 14: mod_base = OTHER; note = 2'-deoxy-2'-fluoroadenosine-3'-phosphate
  modified_base 15: mod_base = OTHER; note = 2'-O-methylcytidine-3'-phosphate
  modified_base 16: mod_base = OTHER; note = 2'-deoxy-2'-fluorocytidine-3'-phosphate
  modified_base 17: mod_base = OTHER; note = 2'-O-methyluridine-3'-phosphate
  modified_base 18: mod_base = OTHER; note = 2'-O-methyluridine-3'-phosphate
  modified_base 19: mod_base = OTHER; note = 2'-O-methylguanosine-3'-phosphate
  modified_base 20: mod_base = OTHER; note = 2'-O-methylguanosine-3'-phosphate
  modified_base 21: mod_base = OTHER; note = 2'-O-methylcytidine-3'-phosphorothioate
  modified_base 22: mod_base = OTHER; note = 2'-O-methylcytidine-3'-phosphorothioate
  modified_base 23: mod_base = OTHER; note = 2'-O-methyladenosine
atcttcgaaagacaccttggcca

SEQ ID NO: 327 - RNA, 23 nt, synthetic construct
  source 1..23: mol_type = other RNA
  modified_base 1: mod_base = OTHER; note = 2'-O-methyladenosine-3'-phosphorothioate
  modified_base 2: mod_base = OTHER; note = 2'-deoxy-2'-fluoroguanosine-3'-phosphorothioate
  modified_base 3: mod_base = OTHER; note = 2'-O-methylcytidine-3'-phosphate
  modified_base 4: mod_base = OTHER; note = 2'-O-methylguanosine-3'-phosphate
  modified_base 5: mod_base = OTHER; note = 2'-O-methyluridine-3'-phosphate
  modified_base 6: mod_base = OTHER; note = 2'-deoxy-2'-fluorouridine-3'-phosphate
  modified_base 7: mod_base = OTHER; note = 2'-O-methyluridine-3'-phosphate
  modified_base 8: mod_base = OTHER; note = 2'-deoxy-2'-fluorocytidine-3'-phosphate
  modified_base 9: mod_base = OTHER; note = 2'-deoxy-2'-fluorocytidine-3'-phosphate
  modified_base 10: mod_base = OTHER; note = 2'-O-methyluridine-3'-phosphate
  modified_base 11: mod_base = OTHER; note = 2'-O-methylguanosine-3'-phosphate
  modified_base 12: mod_base = OTHER; note = 2'-O-methyluridine-3'-phosphate
  modified_base 13: mod_base = OTHER; note = 2'-O-methylcytidine-3'-phosphate
  modified_base 14: mod_base = OTHER; note = 2'-deoxy-2'-fluorouridine-3'-phosphate
  modified_base 15: mod_base = OTHER; note = 2'-O-methyluridine-3'-phosphate
  modified_base 16: mod_base = OTHER; note = 2'-deoxy-2'-fluorouridine-3'-phosphate
  modified_base 17: mod_base = OTHER; note = 2'-O-methyluridine-3'-phosphate
  modified_base 18: mod_base = OTHER; note = 2'-O-methyluridine-3'-phosphate
  modified_base 19: mod_base = OTHER; note = 2'-O-methyladenosine-3'-phosphate
  modified_base 20: mod_base = OTHER; note = 2'-O-methylcytidine-3'-phosphate
  modified_base 21: mod_base = OTHER; note = 2'-O-methyluridine-3'-phosphorothioate
  modified_base 22: mod_base = OTHER; note = 2'-O-methyluridine-3'-phosphorothioate
  modified_base 23: mod_base = OTHER; note = 2'-O-methyluridine
agcgtttcctgtctttttacttt

SEQ ID NO: 328 - RNA, 23 nt, synthetic construct
  source 1..23: mol_type = other RNA
  modified_base 1: mod_base = OTHER; note = 2'-O-methyladenosine-3'-phosphorothioate
  modified_base 2: mod_base = OTHER; note = 2'-deoxy-2'-fluoroadenosine-3'-phosphorothioate
  modified_base 3: mod_base = OTHER; note = 2'-O-methylcytidine-3'-phosphate
  modified_base 4: mod_base = OTHER; note = 2'-O-methyluridine-3'-phosphate
  modified_base 5: mod_base = OTHER; note = 2'-O-methylguanosine-3'-phosphate
  modified_base 6: mod_base = OTHER; note = 2'-deoxy-2'-fluoroguanosine-3'-phosphate
  modified_base 7: mod_base = OTHER; note = 2'-O-methyluridine-3'-phosphate
  modified_base 8: mod_base = OTHER; note = 2'-deoxy-2'-fluoroadenosine-3'-phosphate
  modified_base 9: mod_base = OTHER; note = 2'-deoxy-2'-fluorocytidine-3'-phosphate
  modified_base 10: mod_base = OTHER; note = 2'-O-methyladenosine-3'-phosphate
  modified_base 11: mod_base = OTHER; note = 2'-O-methylguanosine-3'-phosphate
  modified_base 12: mod_base = OTHER; note = 2'-O-methylcytidine-3'-phosphate
  modified_base 13: mod_base = OTHER; note = 2'-O-methylcytidine-3'-phosphate
  modified_base 14: mod_base = OTHER; note = 2'-deoxy-2'-fluorouridine-3'-phosphate
  modified_base 15: mod_base = OTHER; note = 2'-O-methyluridine-3'-phosphate
  modified_base 16: mod_base = OTHER; note = 2'-deoxy-2'-fluoroguanosine-3'-phosphate
  modified_base 17: mod_base = OTHER; note = 2'-O-methyluridine-3'-phosphate
  modified_base 18: mod_base = OTHER; note = 2'-O-methylguanosine-3'-phosphate
  modified_base 19: mod_base = OTHER; note = 2'-O-methyluridine-3'-phosphate
  modified_base 20: mod_base = OTHER; note = 2'-O-methyladenosine-3'-phosphate
  modified_base 21: mod_base = OTHER; note = 2'-O-methyluridine-3'-phosphorothioate
  modified_base 22: mod_base = OTHER; note = 2'-O-methyluridine-3'-phosphorothioate
  modified_base 23: mod_base = OTHER; note = 2'-O-methyladenosine
aactggtacagccttgtgtatta

SEQ ID NO: 329 - RNA, 23 nt, synthetic construct
  source 1..23: mol_type = other RNA
  modified_base 1: mod_base = OTHER; note = 2'-O-methyladenosine-3'-phosphorothioate
  modified_base 2: mod_base = OTHER; note = 2'-deoxy-2'-fluorouridine-3'-phosphorothioate
  modified_base 3: mod_base = OTHER; note = 2'-O-methylguanosine-3'-phosphate
  modified_base 4: mod_base = OTHER; note = 2'-O-methyluridine-3'-phosphate
  modified_base 5: mod_base = OTHER; note = 2'-O-methyluridine-3'-phosphate
  modified_base 6: mod_base = OTHER; note = 2'-deoxy-2'-fluoroguanosine-3'-phosphate
  modified_base 7: mod_base = OTHER; note = 2'-O-methyluridine-3'-phosphate
  modified_base 8: mod_base = OTHER; note = 2'-deoxy-2'-fluorocytidine-3'-phosphate
  modified_base 9: mod_base = OTHER; note = 2'-deoxy-2'-fluorouridine-3'-phosphate
  modified_base 10: mod_base = OTHER; note = 2'-O-methylguanosine-3'-phosphate
  modified_base 11: mod_base = OTHER; note = 2'-O-methylguanosine-3'-phosphate
  modified_base 12: mod_base = OTHER; note = 2'-O-methyladenosine-3'-phosphate
  modified_base 13: mod_base = OTHER; note = 2'-O-methyluridine-3'-phosphate
  modified_base 14: mod_base = OTHER; note = 2'-deoxy-2'-fluoroadenosine-3'-phosphate
  modified_base 15: mod_base = OTHER; note = 2'-O-methylguanosine-3'-phosphate
  modified_base 16: mod_base = OTHER; note = 2'-deoxy-2'-fluoroadenosine-3'-phosphate
  modified_base 17: mod_base = OTHER; note = 2'-O-methylguanosine-3'-phosphate
  modified_base 18: mod_base = OTHER; note = 2'-O-methylguanosine-3'-phosphate
  modified_base 19: mod_base = OTHER; note = 2'-O-methyladenosine-3'-phosphate
  modified_base 20: mod_base = OTHER; note = 2'-O-methyluridine-3'-phosphate
  modified_base 21: mod_base = OTHER; note = 2'-O-methyluridine-3'-phosphorothioate
  modified_base 22: mod_base = OTHER; note = 2'-O-methyladenosine-3'-phosphorothioate
  modified_base 23: mod_base = OTHER; note = 2'-O-methyladenosine
atgttgtctggatagaggattaa

SEQ ID NO: 330 - RNA, 23 nt, synthetic construct
  source 1..23: mol_type = other RNA
  modified_base 1: mod_base = OTHER; note = 2'-O-methyladenosine-3'-phosphorothioate
  modified_base 2: mod_base = OTHER; note = 2'-deoxy-2'-fluoroadenosine-3'-phosphorothioate
  modified_base 3: mod_base = OTHER; note = 2'-O-methyluridine-3'-phosphate
  modified_base 4: mod_base = OTHER; note = 2'-O-methyluridine-3'-phosphate
  modified_base 5: mod_base = OTHER; note = 2'-O-methyladenosine-3'-phosphate
  modified_base 6: mod_base = OTHER; note = 2'-deoxy-2'-fluorocytidine-3'-phosphate
  modified_base 7: mod_base = OTHER; note = 2'-O-methyluridine-3'-phosphate
  modified_base 8: mod_base = OTHER; note = 2'-deoxy-2'-fluorouridine-3'-phosphate
  modified_base 9: mod_base = OTHER; note = 2'-deoxy-2'-fluorouridine-3'-phosphate
  modified_base 10: mod_base = OTHER; note = 2'-O-methylcytidine-3'-phosphate
  modified_base 11: mod_base = OTHER; note = 2'-O-methylcytidine-3'-phosphate
  modified_base 12: mod_base = OTHER; note = 2'-O-methyluridine-3'-phosphate
  modified_base 13: mod_base = OTHER; note = 2'-O-methyluridine-3'-phosphate
  modified_base 14: mod_base = OTHER; note = 2'-deoxy-2'-fluorocytidine-3'-phosphate
  modified_base 15: mod_base = OTHER; note = 2'-O-methyluridine-3'-phosphate
  modified_base 16: mod_base = OTHER; note = 2'-deoxy-2'-fluoroguanosine-3'-phosphate
  modified_base 17: mod_base = OTHER; note = 2'-O-methylcytidine-3'-phosphate
  modified_base 18: mod_base = OTHER; note = 2'-O-methyluridine-3'-phosphate
  modified_base 19: mod_base = OTHER; note = 2'-O-methylcytidine-3'-phosphate
  modified_base 20: mod_base = OTHER; note = 2'-O-methylguanosine-3'-phosphate
  modified_base 21: mod_base = OTHER; note = 2'-O-methyladenosine-3'-phosphorothioate
  modified_base 22: mod_base = OTHER; note = 2'-O-methyladenosine-3'-phosphorothioate
  modified_base 23: mod_base = OTHER; note = 2'-O-methyladenosine
aattactttccttctgctcgaaa

SEQ ID NO: 331 - RNA, 23 nt, synthetic construct
  source 1..23: mol_type = other RNA
  modified_base 1: mod_base = OTHER; note = 2'-O-methyladenosine-3'-phosphorothioate
  modified_base 2: mod_base = OTHER; note = 2'-deoxy-2'-fluorouridine-3'-phosphorothioate
  modified_base 3: mod_base = OTHER; note = 2'-O-methylguanosine-3'-phosphate
  modified_base 4: mod_base = OTHER; note = 2'-O-methylguanosine-3'-phosphate
  modified_base 5: mod_base = OTHER; note = 2'-O-methyladenosine-3'-phosphate
  modified_base 6: mod_base = OTHER; note = 2'-deoxy-2'-fluorouridine-3'-phosphate
  modified_base 7: mod_base = OTHER; note = 2'-O-methyladenosine-3'-phosphate
  modified_base 8: mod_base = OTHER; note = 2'-deoxy-2'-fluoroguanosine-3'-phosphate
  modified_base 9: mod_base = OTHER; note = 2'-deoxy-2'-fluoroadenosine-3'-phosphate
  modified_base 10: mod_base = OTHER; note = 2'-O-methylguanosine-3'-phosphate
  modified_base 11: mod_base = OTHER; note = 2'-O-methylguanosine-3'-phosphate
  modified_base 12: mod_base = OTHER; note = 2'-O-methyladenosine-3'-phosphate
  modified_base 13: mod_base = OTHER; note = 2'-O-methyluridine-3'-phosphate
  modified_base 14: mod_base = OTHER; note = 2'-deoxy-2'-fluorouridine-3'-phosphate
  modified_base 15: mod_base = OTHER; note = 2'-O-methyladenosine-3'-phosphate
  modified_base 16: mod_base = OTHER; note = 2'-deoxy-2'-fluoroadenosine-3'-phosphate
  modified_base 17: mod_base = OTHER; note = 2'-O-methyladenosine-3'-phosphate
  modified_base 18: mod_base = OTHER; note = 2'-O-methylguanosine-3'-phosphate
  modified_base 19: mod_base = OTHER; note = 2'-O-methyluridine-3'-phosphate
  modified_base 20: mod_base = OTHER; note = 2'-O-methylguanosine-3'-phosphate
  modified_base 21: mod_base = OTHER; note = 2'-O-methyladenosine-3'-phosphorothioate
  modified_base 22: mod_base = OTHER; note = 2'-O-methylguanosine-3'-phosphorothioate
  modified_base 23: mod_base = OTHER; note = 2'-O-methylguanosine
atggatagaggattaaagtgagg

SEQ ID NO: 332 - RNA, 23 nt, synthetic construct
  source 1..23: mol_type = other RNA
  modified_base 1: mod_base = OTHER; note = 2'-O-methyluridine-3'-phosphorothioate
  modified_base 2: mod_base = OTHER; note = 2'-deoxy-2'-fluoroguanosine-3'-phosphorothioate
  modified_base 3: mod_base = OTHER; note = 2'-O-methylguanosine-3'-phosphate
  modified_base 4: mod_base = OTHER; note = 2'-O-methyluridine-3'-phosphate
  modified_base 5: mod_base = OTHER; note = 2'-O-methylcytidine-3'-phosphate
  modified_base 6: mod_base = OTHER; note = 2'-deoxy-2'-fluorocytidine-3'-phosphate
  modified_base 7: mod_base = OTHER; note = 2'-O-methyladenosine-3'-phosphate
  modified_base 8: mod_base = OTHER; note = 2'-deoxy-2'-fluorouridine-3'-phosphate
  modified_base 9: mod_base = OTHER; note = 2'-deoxy-2'-fluorouridine-3'-phosphate
  modified_base 10: mod_base = OTHER; note = 2'-O-methyladenosine-3'-phosphate
  modified_base 11: mod_base = OTHER; note = 2'-O-methylcytidine-3'-phosphate
  modified_base 12: mod_base = OTHER; note = 2'-O-methyluridine-3'-phosphate
  modified_base 13: mod_base = OTHER; note = 2'-O-methyluridine-3'-phosphate
  modified_base 14: mod_base = OTHER; note = 2'-deoxy-2'-fluorouridine-3'-phosphate
  modified_base 15: mod_base = OTHER; note = 2'-O-methylcytidine-3'-phosphate
  modified_base 16: mod_base = OTHER; note = 2'-deoxy-2'-fluorocytidine-3'-phosphate
  modified_base 17: mod_base = OTHER; note = 2'-O-methyluridine-3'-phosphate
  modified_base 18: mod_base = OTHER; note = 2'-O-methyluridine-3'-phosphate
  modified_base 19: mod_base = OTHER; note = 2'-O-methylcytidine-3'-phosphate
  modified_base 20: mod_base = OTHER; note = 2'-O-methyluridine-3'-phosphate
  modified_base 21: mod_base = OTHER; note = 2'-O-methylguanosine-3'-phosphorothioate
  modified_base 22: mod_base = OTHER; note = 2'-O-methylcytidine-3'-phosphorothioate
  modified_base 23: mod_base = OTHER; note = 2'-O-methyluridine
tggtccattactttccttctgct

SEQ ID NO: 333 - RNA, 23 nt, synthetic construct
  source 1..23: mol_type = other RNA
  modified_base 1: mod_base = OTHER; note = 2'-O-methyladenosine-3'-phosphorothioate
  modified_base 2: mod_base = OTHER; note = 2'-deoxy-2'-fluorouridine-3'-phosphorothioate
  modified_base 3: mod_base = OTHER; note = 2'-O-methyluridine-3'-phosphate
  modified_base 4: mod_base = OTHER; note = 2'-O-methyluridine-3'-phosphate
  modified_base 5: mod_base = OTHER; note = 2'-O-methylcytidine-3'-phosphate
  modified_base 6: mod_base = OTHER; note = 2'-deoxy-2'-fluorocytidine-3'-phosphate
  modified_base 7: mod_base = OTHER; note = 2'-O-methyluridine-3'-phosphate
  modified_base 8: mod_base = OTHER; note = 2'-deoxy-2'-fluorouridine-3'-phosphate
  modified_base 9: mod_base = OTHER; note = 2'-deoxy-2'-fluorocytidine-3'-phosphate
  modified_base 10: mod_base = OTHER; note = 2'-O-methyluridine-3'-phosphate
  modified_base 11: mod_base = OTHER; note = 2'-O-methylguanosine-3'-phosphate
  modified_base 12: mod_base = OTHER; note = 2'-O-methylcytidine-3'-phosphate
  modified_base 13: mod_base = OTHER; note = 2'-O-methyluridine-3'-phosphate
  modified_base 14: mod_base = OTHER; note = 2'-deoxy-2'-fluorocytidine-3'-phosphate
  modified_base 15: mod_base = OTHER; note = 2'-O-methylguanosine-3'-phosphate
  modified_base 16: mod_base = OTHER; note = 2'-deoxy-2'-fluoroadenosine-3'-phosphate
  modified_base 17: mod_base = OTHER; note = 2'-O-methyladenosine-3'-phosphate
  modified_base 18: mod_base = OTHER; note = 2'-O-methyladenosine-3'-phosphate
  modified_base 19: mod_base = OTHER; note = 2'-O-methyluridine-3'-phosphate
  modified_base 20: mod_base = OTHER; note = 2'-O-methyluridine-3'-phosphate
  modified_base 21: mod_base = OTHER; note = 2'-O-methylguanosine-3'-phosphorothioate
  modified_base 22: mod_base = OTHER; note = 2'-O-methyladenosine-3'-phosphorothioate
  modified_base 23: mod_base = OTHER; note = 2'-O-methyluridine
atttccttctgctcgaaattgat

SEQ ID NO: 334 - RNA, 23 nt, synthetic construct
  source 1..23: mol_type = other RNA
  modified_base 1: mod_base = OTHER; note = 2'-O-methyladenosine-3'-phosphorothioate
  modified_base 2: mod_base = OTHER; note = 2'-deoxy-2'-fluoroadenosine-3'-phosphorothioate
  modified_base 3: mod_base = OTHER; note = 2'-O-methylcytidine-3'-phosphate
  modified_base 4: mod_base = OTHER; note = 2'-O-methyluridine-3'-phosphate
  modified_base 5: mod_base = OTHER; note = 2'-O-methylguanosine-3'-phosphate
  modified_base 6: mod_base = OTHER; note = 2'-deoxy-2'-fluoroguanosine-3'-phosphate
  modified_base 7: mod_base = OTHER; note = 2'-O-methyluridine-3'-phosphate
  modified_base 8: mod_base = OTHER; note = 2'-deoxy-2'-fluorocytidine-3'-phosphate
  modified_base 9: mod_base = OTHER; note = 2'-deoxy-2'-fluorocytidine-3'-phosphate
  modified_base 10: mod_base = OTHER; note = 2'-O-methyladenosine-3'-phosphate
  modified_base 11: mod_base = OTHER; note = 2'-O-methyluridine-3'-phosphate
  modified_base 12: mod_base = OTHER; note = 2'-O-methyluridine-3'-phosphate
  modified_base 13: mod_base = OTHER; note = 2'-O-methyladenosine-3'-phosphate
  modified_base 14: mod_base = OTHER; note = 2'-deoxy-2'-fluorocytidine-3'-phosphate
  modified_base 15: mod_base = OTHER; note = 2'-O-methyluridine-3'-phosphate
  modified_base 16: mod_base = OTHER; note = 2'-deoxy-2'-fluorouridine-3'-phosphate
  modified_base 17: mod_base = OTHER; note = 2'-O-methyluridine-3'-phosphate
  modified_base 18: mod_base = OTHER; note = 2'-O-methylcytidine-3'-phosphate
  modified_base 19: mod_base = OTHER; note = 2'-O-methylcytidine-3'-phosphate
  modified_base 20: mod_base = OTHER; note = 2'-O-methyluridine-3'-phosphate
  modified_base 21: mod_base = OTHER; note = 2'-O-methyluridine-3'-phosphorothioate
  modified_base 22: mod_base = OTHER; note = 2'-O-methylcytidine-3'-phosphorothioate
  modified_base 23: mod_base = OTHER; note = 2'-O-methyluridine
aactggtccattactttccttct

SEQ ID NO: 335 - RNA, 23 nt, synthetic construct
  source 1..23: mol_type = other RNA
  modified_base 1: mod_base = OTHER; note = 2'-O-methyladenosine-3'-phosphorothioate
  modified_base 2: mod_base = OTHER; note = 2'-deoxy-2'-fluorouridine-3'-phosphorothioate
  modified_base 3: mod_base = OTHER; note = 2'-O-methyluridine-3'-phosphate
  modified_base 4: mod_base = OTHER; note = 2'-O-methyladenosine-3'-phosphate
  modified_base 5: mod_base = OTHER; note = 2'-O-methyladenosine-3'-phosphate
  modified_base 6: mod_base = OTHER; note = 2'-deoxy-2'-fluoroadenosine-3'-phosphate
  modified_base 7: mod_base = OTHER; note = 2'-O-methylguanosine-3'-phosphate
  modified_base 8: mod_base = OTHER; note = 2'-deoxy-2'-fluorouridine-3'-phosphate
  modified_base 9: mod_base = OTHER; note = 2'-deoxy-2'-fluoroguanosine-3'-phosphate
  modified_base 10: mod_base = OTHER; note = 2'-O-methyladenosine-3'-phosphate
  modified_base 11: mod_base = OTHER; note = 2'-O-methylguanosine-3'-phosphate
  modified_base 12: mod_base = OTHER; note = 2'-O-methylguanosine-3'-phosphate
  modified_base 13: mod_base = OTHER; note = 2'-O-methyladenosine-3'-phosphate
  modified_base 14: mod_base = OTHER; note = 2'-deoxy-2'-fluorocytidine-3'-phosphate
  modified_base 15: mod_base = OTHER; note = 2'-O-methylcytidine-3'-phosphate
  modified_base 16: mod_base = OTHER; note = 2'-deoxy-2'-fluorouridine-3'-phosphate
  modified_base 17: mod_base = OTHER; note = 2'-O-methylguanosine-3'-phosphate
  modified_base 18: mod_base = OTHER; note = 2'-O-methylcytidine-3'-phosphate
  modified_base 19: mod_base = OTHER; note = 2'-O-methyladenosine-3'-phosphate
  modified_base 20: mod_base = OTHER; note = 2'-O-methylcytidine-3'-phosphate
  modified_base 21: mod_base = OTHER; note = 2'-O-methyluridine-3'-phosphorothioate
  modified_base 22: mod_base = OTHER; note = 2'-O-methylguanosine-3'-phosphorothioate
  modified_base 23: mod_base = OTHER; note = 2'-O-methylguanosine
attaaagtgaggacctgcactgg

SEQ ID NO: 336 - RNA, 23 nt, synthetic construct
  source 1..23: mol_type = other RNA
  modified_base 1: mod_base = OTHER; note = 2'-O-methylcytidine-3'-phosphorothioate
  modified_base 2: mod_base = OTHER; note = 2'-deoxy-2'-fluoroadenosine-3'-phosphorothioate
  modified_base 3: mod_base = OTHER; note = 2'-O-methyladenosine-3'-phosphate
  modified_base 4: mod_base = OTHER; note = 2'-O-methyladenosine-3'-phosphate
  modified_base 5: mod_base = OTHER; note = 2'-O-methylcytidine-3'-phosphate
  modified_base 6: mod_base = OTHER; note = 2'-deoxy-2'-fluorouridine-3'-phosphate
  modified_base 7: mod_base = OTHER; note = 2'-O-methylguanosine-3'-phosphate
  modified_base 8: mod_base = OTHER; note = 2'-deoxy-2'-fluoroadenosine-3'-phosphate
  modified_base 9: mod_base = OTHER; note = 2'-deoxy-2'-fluorouridine-3'-phosphate
  modified_base 10: mod_base = OTHER; note = 2'-O-methylguanosine-3'-phosphate
  modified_base 11: mod_base = OTHER; note = 2'-O-methyladenosine-3'-phosphate
  modified_base 12: mod_base = OTHER; note = 2'-O-methyladenosine-3'-phosphate
  modified_base 13: mod_base = OTHER; note = 2'-O-methylcytidine-3'-phosphate
  modified_base 14: mod_base = OTHER; note = 2'-deoxy-2'-fluoroadenosine-3'-phosphate
  modified_base 15: mod_base = OTHER; note = 2'-O-methyluridine-3'-phosphate
  modified_base 16: mod_base = OTHER; note = 2'-deoxy-2'-fluoroguanosine-3'-phosphate
  modified_base 17: mod_base = OTHER; note = 2'-O-methylguanosine-3'-phosphate
  modified_base 18: mod_base = OTHER; note = 2'-O-methyladenosine-3'-phosphate
  modified_base 19: mod_base = OTHER; note = 2'-O-methyladenosine-3'-phosphate
  modified_base 20: mod_base = OTHER; note = 2'-O-methyluridine-3'-phosphate
  modified_base 21: mod_base = OTHER; note = 2'-O-methylcytidine-3'-phosphorothioate
  modified_base 22: mod_base = OTHER; note = 2'-O-methylcytidine-3'-phosphorothioate
  modified_base 23: mod_base = OTHER; note = 2'-O-methyladenosine
caaactgatgaacatggaatcca

SEQ ID NO: 337 - RNA, 23 nt, synthetic construct
  source 1..23: mol_type = other RNA
  modified_base 1: mod_base = OTHER; note = 2'-O-methyladenosine-3'-phosphorothioate
  modified_base 2: mod_base = OTHER; note = 2'-deoxy-2'-fluoroguanosine-3'-phosphorothioate
  modified_base 3: mod_base = OTHER; note = 2'-O-methyladenosine-3'-phosphate
  modified_base 4: mod_base = OTHER; note = 2'-O-methyluridine-3'-phosphate
  modified_base 5: mod_base = OTHER; note = 2'-O-methylcytidine-3'-phosphate
  modified_base 6: mod_base = OTHER; note = 2'-deoxy-2'-fluoroadenosine-3'-phosphate
  modified_base 7: mod_base = OTHER; note = 2'-O-methylcytidine-3'-phosphate
  modified_base 8: mod_base = OTHER; note = 2'-deoxy-2'-fluoroadenosine-3'-phosphate
  modified_base 9: mod_base = OTHER; note = 2'-deoxy-2'-fluoroguanosine-3'-phosphate
  modified_base 10: mod_base = OTHER; note = 2'-O-methyladenosine-3'-phosphate
  modified_base 11: mod_base = OTHER; note = 2'-O-methyladenosine-3'-phosphate
  modified_base 12: mod_base = OTHER; note = 2'-O-methyluridine-3'-phosphate
  modified_base 13: mod_base = OTHER; note = 2'-O-methylcytidine-3'-phosphate
  modified_base 14: mod_base = OTHER; note = 2'-deoxy-2'-fluorouridine-3'-phosphate
  modified_base 15: mod_base = OTHER; note = 2'-O-methyluridine-3'-phosphate
  modified_base 16: mod_base = OTHER; note = 2'-deoxy-2'-fluorocytidine-3'-phosphate
  modified_base 17: mod_base = OTHER; note = 2'-O-methylguanosine-3'-phosphate
  modified_base 18: mod_base = OTHER; note = 2'-O-methyladenosine-3'-phosphate
  modified_base 19: mod_base = OTHER; note = 2'-O-methyladenosine-3'-phosphate
  modified_base 20: mod_base = OTHER; note = 2'-O-methyladenosine-3'-phosphate
  modified_base 21: mod_base = OTHER; note = 2'-O-methylguanosine-3'-phosphorothioate
  modified_base 22: mod_base = OTHER; note = 2'-O-methyladenosine-3'-phosphorothioate
  modified_base 23: mod_base = OTHER; note = 2'-O-methylcytidine
agatcacagaatcttcgaaagac

SEQ ID NO: 338 - RNA, 23 nt, synthetic construct
  source 1..23: mol_type = other RNA
  modified_base 1: mod_base = OTHER; note = 2'-O-methyluridine-3'-phosphorothioate
  modified_base 2: mod_base = OTHER; note = 2'-deoxy-2'-fluorouridine-3'-phosphorothioate
  modified_base 3: mod_base = OTHER; note = 2'-O-methyladenosine-3'-phosphate
  modified_base 4: mod_base = OTHER; note = 2'-O-methylcytidine-3'-phosphate
  modified_base 5: mod_base = OTHER; note = 2'-O-methyluridine-3'-phosphate
  modified_base 6: mod_base = OTHER; note = 2'-deoxy-2'-fluorouridine-3'-phosphate
  modified_base 7: mod_base = OTHER; note = 2'-O-methyluridine-3'-phosphate
  modified_base 8: mod_base = OTHER; note = 2'-deoxy-2'-fluorocytidine-3'-phosphate
  modified_base 9: mod_base = OTHER; note = 2'-deoxy-2'-fluorocytidine-3'-phosphate
  modified_base 10: mod_base = OTHER; note = 2'-O-methyluridine-3'-phosphate
  modified_base 11: mod_base = OTHER; note = 2'-O-methyluridine-3'-phosphate
  modified_base 12: mod_base = OTHER; note = 2'-O-methylcytidine-3'-phosphate
  modified_base 13: mod_base = OTHER; note = 2'-O-methyluridine-3'-phosphate
  modified_base 14: mod_base = OTHER; note = 2'-deoxy-2'-fluoroguanosine-3'-phosphate
  modified_base 15: mod_base = OTHER; note = 2'-O-methylcytidine-3'-phosphate
  modified_base 16: mod_base = OTHER; note = 2'-deoxy-2'-fluorouridine-3'-phosphate
  modified_base 17: mod_base = OTHER; note = 2'-O-methylcytidine-3'-phosphate
  modified_base 18: mod_base = OTHER; note = 2'-O-methylguanosine-3'-phosphate
  modified_base 19: mod_base = OTHER; note = 2'-O-methyladenosine-3'-phosphate
  modified_base 20: mod_base = OTHER; note = 2'-O-methyladenosine-3'-phosphate
  modified_base 21: mod_base = OTHER; note = 2'-O-methyladenosine-3'-phosphorothioate
  modified_base 22: mod_base = OTHER; note = 2'-O-methyluridine-3'-phosphorothioate
  modified_base 23: mod_base = OTHER; note = 2'-O-methyluridine
ttactttccttctgctcgaaatt

SEQ ID NO: 339 - RNA, 23 nt, synthetic construct
  source 1..23: mol_type = other RNA
  modified_base 1: mod_base = OTHER; note = 2'-O-methyluridine-3'-phosphorothioate
  modified_base 2: mod_base = OTHER; note = 2'-deoxy-2'-fluoroguanosine-3'-phosphorothioate
  modified_base 3: mod_base = OTHER; note = 2'-O-methyluridine-3'-phosphate
  modified_base 4: mod_base = OTHER; note = 2'-O-methyluridine-3'-phosphate
  modified_base 5: mod_base = OTHER; note = 2'-O-methylguanosine-3'-phosphate
  modified_base 6: mod_base = OTHER; note = 2'-deoxy-2'-fluorouridine-3'-phosphate
  modified_base 7: mod_base = OTHER; note = 2'-O-methylcytidine-3'-phosphate
  modified_base 8: mod_base = OTHER; note = 2'-deoxy-2'-fluorouridine-3'-phosphate
  modified_base 9: mod_base = OTHER; note = 2'-deoxy-2'-fluoroguanosine-3'-phosphate
  modified_base 10: mod_base = OTHER; note = 2'-O-methylguanosine-3'-phosphate
  modified_base 11: mod_base = OTHER; note = 2'-O-methyladenosine-3'-phosphate
  modified_base 12: mod_base = OTHER; note = 2'-O-methyluridine-3'-phosphate
  modified_base 13: mod_base = OTHER; note = 2'-O-methyladenosine-3'-phosphate
  modified_base 14: mod_base = OTHER; note = 2'-deoxy-2'-fluoroguanosine-3'-phosphate
  modified_base 15: mod_base = OTHER; note = 2'-O-methyladenosine-3'-phosphate
  modified_base 16: mod_base = OTHER; note = 2'-deoxy-2'-fluoroguanosine-3'-phosphate
  modified_base 17: mod_base = OTHER; note = 2'-O-methylguanosine-3'-phosphate
  modified_base 18: mod_base = OTHER; note = 2'-O-methyladenosine-3'-phosphate
  modified_base 19: mod_base = OTHER; note = 2'-O-methyluridine-3'-phosphate
  modified_base 20: mod_base = OTHER; note = 2'-O-methyluridine-3'-phosphate
  modified_base 21: mod_base = OTHER; note = 2'-O-methyladenosine-3'-phosphorothioate
  modified_base 22: mod_base = OTHER; note = 2'-O-methyladenosine-3'-phosphorothioate
  modified_base 23: mod_base = OTHER; note = 2'-O-methyladenosine
tgttgtctggatagaggattaaa

SEQ ID NO: 340 - RNA, 23 nt, synthetic construct
  source 1..23: mol_type = other RNA
  modified_base 1: mod_base = OTHER; note = 2'-O-methyluridine-3'-phosphorothioate
  modified_base 2: mod_base = OTHER; note = 2'-deoxy-2'-fluorouridine-3'-phosphorothioate
  modified_base 3: mod_base = OTHER; note = 2'-O-methyladenosine-3'-phosphate
  modified_base 4: mod_base = OTHER; note = 2'-O-methyluridine-3'-phosphate
  modified_base 5: mod_base = OTHER; note = 2'-O-methylcytidine-3'-phosphate
  modified_base 6: mod_base = OTHER; note = 2'-deoxy-2'-fluorouridine-3'-phosphate
  modified_base 7: mod_base = OTHER; note = 2'-O-methylcytidine-3'-phosphate
  modified_base 8: mod_base = OTHER; note = 2'-deoxy-2'-fluorocytidine-3'-phosphate
  modified_base 9: mod_base = OTHER; note = 2'-deoxy-2'-fluoroadenosine-3'-phosphate
  modified_base 10: mod_base = OTHER; note = 2'-O-methyladenosine-3'-phosphate
  modified_base 11: mod_base = OTHER; note = 2'-O-methyladenosine-3'-phosphate
  modified_base 12: mod_base = OTHER; note = 2'-O-methylcytidine-3'-phosphate
  modified_base 13: mod_base = OTHER; note = 2'-O-methyluridine-3'-phosphate
  modified_base 14: mod_base = OTHER; note = 2'-deoxy-2'-fluoroguanosine-3'-phosphate
  modified_base 15: mod_base = OTHER; note = 2'-O-methyladenosine-3'-phosphate
  modified_base 16: mod_base = OTHER; note = 2'-deoxy-2'-fluorouridine-3'-phosphate
  modified_base 17: mod_base = OTHER; note = 2'-O-methylguanosine-3'-phosphate
  modified_base 18: mod_base = OTHER; note = 2'-O-methyladenosine-3'-phosphate
  modified_base 19: mod_base = OTHER; note = 2'-O-methyladenosine-3'-phosphate
  modified_base 20: mod_base = OTHER; note = 2'-O-methylcytidine-3'-phosphate
  modified_base 21: mod_base = OTHER; note = 2'-O-methyladenosine-3'-phosphorothioate
  modified_base 22: mod_base = OTHER; note = 2'-O-methyluridine-3'-phosphorothioate
  modified_base 23: mod_base = OTHER; note = 2'-O-methylguanosine
ttatctccaaactgatgaacatg

SEQ ID NO: 341 - RNA, 23 nt, synthetic construct
  source 1..23: mol_type = other RNA
  modified_base 1: mod_base = OTHER; note = 2'-O-methyladenosine-3'-phosphorothioate
  modified_base 2: mod_base = OTHER; note = 2'-deoxy-2'-fluoroadenosine-3'-phosphorothioate
  modified_base 3: mod_base = OTHER; note = 2'-O-methyluridine-3'-phosphate
  modified_base 4: mod_base = OTHER; note = 2'-O-methyluridine-3'-phosphate
  modified_base 5: mod_base = OTHER; note = 2'-O-methyladenosine-3'-phosphate
  modified_base 6: mod_base = OTHER; note = 2'-deoxy-2'-fluoroadenosine-3'-phosphate
  modified_base 7: mod_base = OTHER; note = 2'-O-methyladenosine-3'-phosphate
  modified_base 8: mod_base = OTHER; note = 2'-deoxy-2'-fluoroguanosine-3'-phosphate
  modified_base 9: mod_base = OTHER; note = 2'-deoxy-2'-fluorouridine-3'-phosphate
  modified_base 10: mod_base = OTHER; note = 2'-O-methylguanosine-3'-phosphate
  modified_base 11: mod_base = OTHER; note = 2'-O-methyladenosine-3'-phosphate
  modified_base 12: mod_base = OTHER; note = 2'-O-methylguanosine-3'-phosphate
  modified_base 13: mod_base = OTHER; note = 2'-O-methylguanosine-3'-phosphate
  modified_base 14: mod_base = OTHER; note = 2'-deoxy-2'-fluoroadenosine-3'-phosphate
  modified_base 15: mod_base = OTHER; note = 2'-O-methylcytidine-3'-phosphate
  modified_base 16: mod_base = OTHER; note = 2'-deoxy-2'-fluorocytidine-3'-phosphate
  modified_base 17: mod_base = OTHER; note = 2'-O-methyluridine-3'-phosphate
  modified_base 18: mod_base = OTHER; note = 2'-O-methylguanosine-3'-phosphate
  modified_base 19: mod_base = OTHER; note = 2'-O-methylcytidine-3'-phosphate
  modified_base 20: mod_base = OTHER; note = 2'-O-methyladenosine-3'-phosphate
  modified_base 21: mod_base = OTHER; note = 2'-O-methylcytidine-3'-phosphorothioate
  modified_base 22: mod_base = OTHER; note = 2'-O-methyluridine-3'-phosphorothioate
  modified_base 23: mod_base = OTHER; note = 2'-O-methylguanosine
aattaaagtgaggacctgcactg

SEQ ID NO: 342 - RNA, 23 nt, synthetic construct
  source 1..23: mol_type = other RNA
  modified_base 1: mod_base = OTHER; note = 2'-O-methyladenosine-3'-phosphorothioate
  modified_base 2: mod_base = OTHER; note = 2'-deoxy-2'-fluoroadenosine-3'-phosphorothioate
  modified_base 3: mod_base = OTHER; note = 2'-O-methylcytidine-3'-phosphate
  modified_base 4: mod_base = OTHER; note = 2'-O-methyladenosine-3'-phosphate
  modified_base 5: mod_base = OTHER; note = 2'-O-methylcytidine-3'-phosphate
  modified_base 6: mod_base = OTHER; note = 2'-deoxy-2'-fluorocytidine-3'-phosphate
  modified_base 7: mod_base = OTHER; note = 2'-O-methyluridine-3'-phosphate
  modified_base 8: mod_base = OTHER; note = 2'-deoxy-2'-fluorouridine-3'-phosphate
  modified_base 9: mod_base = OTHER; note = 2'-deoxy-2'-fluorocytidine-3'-phosphate
  modified_base 10: mod_base = OTHER; note = 2'-O-methyladenosine-3'-phosphate
  modified_base 11: mod_base = OTHER; note = 2'-O-methylcytidine-3'-phosphate
  modified_base 12: mod_base = OTHER; note = 2'-O-methyluridine-3'-phosphate
  modified_base 13: mod_base = OTHER; note = 2'-O-methylguanosine-3'-phosphate
  modified_base 14: mod_base = OTHER; note = 2'-deoxy-2'-fluoroguanosine-3'-phosphate
  modified_base 15: mod_base = OTHER; note = 2'-O-methyluridine-3'-phosphate
  modified_base 16: mod_base = OTHER; note = 2'-deoxy-2'-fluorocytidine-3'-phosphate
  modified_base 17: mod_base = OTHER; note = 2'-O-methylcytidine-3'-phosphate
  modified_base 18: mod_base = OTHER; note = 2'-O-methyladenosine-3'-phosphate
  modified_base 19: mod_base = OTHER; note = 2'-O-methyluridine-3'-phosphate
  modified_base 20: mod_base = OTHER; note = 2'-O-methyluridine-3'-phosphate
  modified_base 21: mod_base = OTHER; note = 2'-O-methyladenosine-3'-phosphorothioate
  modified_base 22: mod_base = OTHER; note = 2'-O-methylcytidine-3'-phosphorothioate
  modified_base 23: mod_base = OTHER; note = 2'-O-methyluridine
aacaccttcactggtccattact

SEQ ID NO: 343 - RNA, 23 nt, synthetic construct
  source 1..23: mol_type = other RNA
  modified_base 1: mod_base = OTHER; note = 2'-O-methyladenosine-3'-phosphorothioate
  modified_base 2: mod_base = OTHER; note = 2'-deoxy-2'-fluorouridine-3'-phosphorothioate
  modified_base 3: mod_base = OTHER; note = 2'-O-methyluridine-3'-phosphate
  modified_base 4: mod_base = OTHER; note = 2'-O-methylguanosine-3'-phosphate
  modified_base 5: mod_base = OTHER; note = 2'-O-methyluridine-3'-phosphate
  modified_base 6: mod_base = OTHER; note = 2'-deoxy-2'-fluorocytidine-3'-phosphate
  modified_base 7: mod_base = OTHER; note = 2'-O-methyluridine-3'-phosphate
  modified_base 8: mod_base = OTHER; note = 2'-deoxy-2'-fluoroguanosine-3'-phosphate
  modified_base 9: mod_base = OTHER; note = 2'-deoxy-2'-fluoroguanosine-3'-phosphate
  modified_base 10: mod_base = OTHER; note = 2'-O-methyladenosine-3'-phosphate
  modified_base 11: mod_base = OTHER; note = 2'-O-methyluridine-3'-phosphate
  modified_base 12: mod_base = OTHER; note = 2'-O-methyladenosine-3'-phosphate
  modified_base 13: mod_base = OTHER; note = 2'-O-methylguanosine-3'-phosphate
  modified_base 14: mod_base = OTHER; note = 2'-deoxy-2'-fluoroadenosine-3'-phosphate
  modified_base 15: mod_base = OTHER; note = 2'-O-methylguanosine-3'-phosphate
  modified_base 16: mod_base = OTHER; note = 2'-deoxy-2'-fluoroguanosine-3'-phosphate
  modified_base 17: mod_base = OTHER; note = 2'-O-methyladenosine-3'-phosphate
  modified_base 18: mod_base = OTHER; note = 2'-O-methyluridine-3'-phosphate
  modified_base 19: mod_base = OTHER; note = 2'-O-methyluridine-3'-phosphate
  modified_base 20: mod_base = OTHER; note = 2'-O-methyladenosine-3'-phosphate
  modified_base 21: mod_base = OTHER; note = 2'-O-methyladenosine-3'-phosphorothioate
  modified_base 22: mod_base = OTHER; note = 2'-O-methyladenosine-3'-phosphorothioate
  modified_base 23: mod_base = OTHER; note = 2'-O-methylguanosine
attgtctggatagaggattaaag

SEQ ID NO: 344 - RNA, 23 nt, synthetic construct
  source 1..23: mol_type = other RNA
  modified_base 1: mod_base = OTHER; note = 2'-O-methyladenosine-3'-phosphorothioate
  modified_base 2: mod_base = OTHER; note = 2'-deoxy-2'-fluoroadenosine-3'-phosphorothioate
  modified_base 3: mod_base = OTHER; note = 2'-O-methyluridine-3'-phosphate
  modified_base 4: mod_base = OTHER; note = 2'-O-methylguanosine-3'-phosphate
  modified_base 5: mod_base = OTHER; note = 2'-O-methyladenosine-3'-phosphate
  modified_base 6: mod_base = OTHER; note = 2'-deoxy-2'-fluorouridine-3'-phosphate
  modified_base 7: mod_base = OTHER; note = 2'-O-methylguanosine-3'-phosphate
  modified_base 8: mod_base = OTHER; note = 2'-deoxy-2'-fluoroguanosine-3'-phosphate
  modified_base 9: mod_base = OTHER; note = 2'-deoxy-2'-fluoroadenosine-3'-phosphate
  modified_base 10: mod_base = OTHER; note = 2'-O-methyladenosine-3'-phosphate
  modified_base 11: mod_base = OTHER; note = 2'-O-methyluridine-3'-phosphate
  modified_base 12: mod_base = OTHER; note = 2'-O-methylguanosine-3'-phosphate
  modified_base 13: mod_base = OTHER; note = 2'-O-methylguanosine-3'-phosphate
  modified_base 14: mod_base = OTHER; note = 2'-deoxy-2'-fluorouridine-3'-phosphate
  modified_base 15: mod_base = OTHER; note = 2'-O-methylcytidine-3'-phosphate
  modified_base 16: mod_base = OTHER; note = 2'-deoxy-2'-fluorouridine-3'-phosphate
  modified_base 17: mod_base = OTHER; note = 2'-O-methylcytidine-3'-phosphate
  modified_base 18: mod_base = OTHER; note = 2'-O-methylcytidine-3'-phosphate
  modified_base 19: mod_base = OTHER; note = 2'-O-methyluridine-3'-phosphate
  modified_base 20: mod_base = OTHER; note = 2'-O-methylguanosine-3'-phosphate
  modified_base 21: mod_base = OTHER; note = 2'-O-methyladenosine-3'-phosphorothioate
  modified_base 22: mod_base = OTHER; note = 2'-O-methylguanosine-3'-phosphorothioate
  modified_base 23: mod_base = OTHER; note = 2'-O-methyladenosine
aatgatggaatggtctcctgaga

SEQ ID NO: 345 - RNA, 23 nt, synthetic construct
  source 1..23: mol_type = other RNA
  modified_base 1: mod_base = OTHER; note = 2'-O-methyluridine-3'-phosphorothioate
  modified_base 2: mod_base = OTHER; note = 2'-deoxy-2'-fluorouridine-3'-phosphorothioate
  modified_base 3: mod_base = OTHER; note = 2'-O-methylcytidine-3'-phosphate
  modified_base 4: mod_base = OTHER; note = 2'-O-methyluridine-3'-phosphate
  modified_base 5: mod_base = OTHER; note = 2'-O-methylguanosine-3'-phosphate
  modified_base 6: mod_base = OTHER; note = 2'-deoxy-2'-fluorocytidine-3'-phosphate
  modified_base 7: mod_base = OTHER; note = 2'-O-methyluridine-3'-phosphate
  modified_base 8: mod_base = OTHER; note = 2'-deoxy-2'-fluorocytidine-3'-phosphate
  modified_base 9: mod_base = OTHER; note = 2'-deoxy-2'-fluoroguanosine-3'-phosphate
  modified_base 10: mod_base = OTHER; note = 2'-O-methyladenosine-3'-phosphate
  modified_base 11: mod_base = OTHER; note = 2'-O-methyladenosine-3'-phosphate
  modified_base 12: mod_base = OTHER; note = 2'-O-methyladenosine-3'-phosphate
  modified_base 13: mod_base = OTHER; note = 2'-O-methyluridine-3'-phosphate
  modified_base 14: mod_base = OTHER; note = 2'-deoxy-2'-fluorouridine-3'-phosphate
  modified_base 15: mod_base = OTHER; note = 2'-O-methylguanosine-3'-phosphate
  modified_base 16: mod_base = OTHER; note = 2'-deoxy-2'-fluoroadenosine-3'-phosphate
  modified_base 17: mod_base = OTHER; note = 2'-O-methyluridine-3'-phosphate
  modified_base 18: mod_base = OTHER; note = 2'-O-methylguanosine-3'-phosphate
  modified_base 19: mod_base = OTHER; note = 2'-O-methylguanosine-3'-phosphate
  modified_base 20: mod_base = OTHER; note = 2'-O-methyluridine-3'-phosphate
  modified_base 21: mod_base = OTHER; note = 2'-O-methylguanosine-3'-phosphorothioate
  modified_base 22: mod_base = OTHER; note = 2'-O-methylcytidine-3'-phosphorothioate
  modified_base 23: mod_base = OTHER; note = 2'-O-methylcytidine
ttctgctcgaaattgatggtgcc

SEQ ID NO: 346 - RNA, 23 nt, synthetic construct
  source 1..23: mol_type = other RNA
  modified_base 1: mod_base = OTHER; note = 2'-O-methyladenosine-3'-phosphorothioate
  modified_base 2: mod_base = OTHER; note = 2'-deoxy-2'-fluoroguanosine-3'-phosphorothioate
  modified_base 3: mod_base = OTHER; note = 2'-O-methylguanosine-3'-phosphate
  modified_base 4: mod_base = OTHER; note = 2'-O-methyladenosine-3'-phosphate
  modified_base 5: mod_base = OTHER; note = 2'-O-methyluridine-3'-phosphate
  modified_base 6: mod_base = OTHER; note = 2'-deoxy-2'-fluorouridine-3'-phosphate
  modified_base 7: mod_base = OTHER; note = 2'-O-methyladenosine-3'-phosphate
  modified_base 8: mod_base = OTHER; note = 2'-deoxy-2'-fluoroadenosine-3'-phosphate
  modified_base 9: mod_base = OTHER; note = 2'-deoxy-2'-fluoroadenosine-3'-phosphate
  modified_base 10: mod_base = OTHER; note = 2'-O-methylguanosine-3'-phosphate
  modified_base 11: mod_base = OTHER; note = 2'-O-methyluridine-3'-phosphate
  modified_base 12: mod_base = OTHER; note = 2'-O-methylguanosine-3'-phosphate
  modified_base 13: mod_base = OTHER; note = 2'-O-methyladenosine-3'-phosphate
  modified_base 14: mod_base = OTHER; note = 2'-deoxy-2'-fluoroguanosine-3'-phosphate
  modified_base 15: mod_base = OTHER; note = 2'-O-methylguanosine-3'-phosphate
  modified_base 16: mod_base = OTHER; note = 2'-deoxy-2'-fluoroadenosine-3'-phosphate
  modified_base 17: mod_base = OTHER; note = 2'-O-methylcytidine-3'-phosphate
  modified_base 18: mod_base = OTHER; note = 2'-O-methylcytidine-3'-phosphate
  modified_base 19: mod_base = OTHER; note = 2'-O-methyluridine-3'-phosphate
  modified_base 20: mod_base = OTHER; note = 2'-O-methylguanosine-3'-phosphate
  modified_base 21: mod_base = OTHER; note = 2'-O-methylcytidine-3'-phosphorothioate
  modified_base 22: mod_base = OTHER; note = 2'-O-methyladenosine-3'-phosphorothioate
  modified_base 23: mod_base = OTHER; note = 2'-O-methylcytidine
aggattaaagtgaggacctgcac

SEQ ID NO: 347 - RNA, 23 nt, synthetic construct
  source 1..23: mol_type = other RNA
  modified_base 1: mod_base = OTHER; note = 2'-O-methyladenosine-3'-phosphorothioate
  modified_base 2: mod_base = OTHER; note = 2'-deoxy-2'-fluoroadenosine-3'-phosphorothioate
  modified_base 3: mod_base = OTHER; note = 2'-O-methylguanosine-3'-phosphate
  modified_base 4: mod_base = OTHER; note = 2'-O-methyladenosine-3'-phosphate
  modified_base 5: mod_base = OTHER; note = 2'-O-methyluridine-3'-phosphate
  modified_base 6: mod_base = OTHER; note = 2'-deoxy-2'-fluorocytidine-3'-phosphate
  modified_base 7: mod_base = OTHER; note = 2'-O-methyladenosine-3'-phosphate
  modified_base 8: mod_base = OTHER; note = 2'-deoxy-2'-fluorocytidine-3'-phosphate
  modified_base 9: mod_base = OTHER; note = 2'-deoxy-2'-fluoroadenosine-3'-phosphate
  modified_base 10: mod_base = OTHER; note = 2'-O-methylguanosine-3'-phosphate
  modified_base 11: mod_base = OTHER; note = 2'-O-methyladenosine-3'-phosphate
  modified_base 12: mod_base = OTHER; note = 2'-O-methyladenosine-3'-phosphate
  modified_base 13: mod_base = OTHER; note = 2'-O-methyluridine-3'-phosphate
  modified_base 14: mod_base = OTHER; note = 2'-deoxy-2'-fluorocytidine-3'-phosphate
  modified_base 15: mod_base = OTHER; note = 2'-O-methyluridine-3'-phosphate
  modified_base 16: mod_base = OTHER; note = 2'-deoxy-2'-fluorouridine-3'-phosphate
  modified_base 17: mod_base = OTHER; note = 2'-O-methylcytidine-3'-phosphate
  modified_base 18: mod_base = OTHER; note = 2'-O-methylguanosine-3'-phosphate
  modified_base 19: mod_base = OTHER; note = 2'-O-methyladenosine-3'-phosphate
  modified_base 20: mod_base = OTHER; note = 2'-O-methyladenosine-3'-phosphate
  modified_base 21: mod_base = OTHER; note = 2'-O-methyladenosine-3'-phosphorothioate
  modified_base 22: mod_base = OTHER; note = 2'-O-methylguanosine-3'-phosphorothioate
  modified_base 23: mod_base = OTHER; note = 2'-O-methyladenosine
aagatcacagaatcttcgaaaga

SEQ ID NO: 348 - RNA, 23 nt, synthetic construct
  source 1..23: mol_type = other RNA
  modified_base 1: mod_base = OTHER; note = 2'-O-methyladenosine-3'-phosphorothioate
  modified_base 2: mod_base = OTHER; note = 2'-deoxy-2'-fluoroadenosine-3'-phosphorothioate
  modified_base 3: mod_base = OTHER; note = 2'-O-methyluridine-3'-phosphate
  modified_base 4: mod_base = OTHER; note = 2'-O-methylguanosine-3'-phosphate
  modified_base 5: mod_base = OTHER; note = 2'-O-methyladenosine-3'-phosphate
  modified_base 6: mod_base = OTHER; note = 2'-deoxy-2'-fluoroadenosine-3'-phosphate
  modified_base 7: mod_base = OTHER; note = 2'-O-methylcytidine-3'-phosphate
  modified_base 8: mod_base = OTHER; note = 2'-deoxy-2'-fluoroadenosine-3'-phosphate
  modified_base 9: mod_base = OTHER; note = 2'-deoxy-2'-fluorouridine-3'-phosphate
  modified_base 10: mod_base = OTHER; note = 2'-O-methylguanosine-3'-phosphate
  modified_base 11: mod_base = OTHER; note = 2'-O-methylguanosine-3'-phosphate
  modified_base 12: mod_base = OTHER; note = 2'-O-methyladenosine-3'-phosphate
  modified_base 13: mod_base = OTHER; note = 2'-O-methyladenosine-3'-phosphate
  modified_base 14: mod_base = OTHER; note = 2'-deoxy-2'-fluorouridine-3'-phosphate
  modified_base 15: mod_base = OTHER; note = 2'-O-methylcytidine-3'-phosphate
  modified_base 16: mod_base = OTHER; note = 2'-deoxy-2'-fluorocytidine-3'-phosphate
  modified_base 17: mod_base = OTHER; note = 2'-O-methyladenosine-3'-phosphate
  modified_base 18: mod_base = OTHER; note = 2'-O-methyluridine-3'-phosphate
  modified_base 19: mod_base = OTHER; note = 2'-O-methylguanosine-3'-phosphate
  modified_base 20: mod_base = OTHER; note = 2'-O-methylcytidine-3'-phosphate
  modified_base 21: mod_base = OTHER; note = 2'-O-methyladenosine-3'-phosphorothioate
  modified_base 22: mod_base = OTHER; note = 2'-O-methylguanosine-3'-phosphorothioate
  modified_base 23: mod_base = OTHER; note = 2'-O-methylguanosine
aatgaacatggaatccatgcagg

SEQ ID NO: 349 - RNA, 23 nt, synthetic construct
  source 1..23: mol_type = other RNA
  modified_base 1: mod_base = OTHER; note = 2'-O-methyladenosine-3'-phosphorothioate
  modified_base 2: mod_base = OTHER; note = 2'-deoxy-2'-fluoroguanosine-3'-phosphorothioate
  modified_base 3: mod_base = OTHER; note = 2'-O-methyluridine-3'-phosphate
  modified_base 4: mod_base = OTHER; note = 2'-O-methylguanosine-3'-phosphate
  modified_base 5: mod_base = OTHER; note = 2'-O-methyluridine-3'-phosphate
  modified_base 6: mod_base = OTHER; note = 2'-deoxy-2'-fluorouridine-3'-phosphate
  modified_base 7: mod_base = OTHER; note = 2'-O-methylguanosine-3'-phosphate
  modified_base 8: mod_base = OTHER; note = 2'-deoxy-2'-fluorouridine-3'-phosphate
  modified_base 9: mod_base = OTHER; note = 2'-deoxy-2'-fluorocytidine-3'-phosphate
  modified_base 10: mod_base = OTHER; note = 2'-O-methyluridine-3'-phosphate
  modified_base 11: mod_base = OTHER; note = 2'-O-methylguanosine-3'-phosphate
  modified_base 12: mod_base = OTHER; note = 2'-O-methylguanosine-3'-phosphate
  modified_base 13: mod_base = OTHER; note = 2'-O-methyladenosine-3'-phosphate
  modified_base 14: mod_base = OTHER; note = 2'-deoxy-2'-fluorouridine-3'-phosphate
  modified_base 15: mod_base = OTHER; note = 2'-O-methyladenosine-3'-phosphate
  modified_base 16: mod_base = OTHER; note = 2'-deoxy-2'-fluoroguanosine-3'-phosphate
  modified_base 17: mod_base = OTHER; note = 2'-O-methyladenosine-3'-phosphate
  modified_base 18: mod_base = OTHER; note = 2'-O-methylguanosine-3'-phosphate
  modified_base 19: mod_base = OTHER; note = 2'-O-methylguanosine-3'-phosphate
  modified_base 20: mod_base = OTHER; note = 2'-O-methyladenosine-3'-phosphate
  modified_base 21: mod_base = OTHER; note = 2'-O-methyluridine-3'-phosphorothioate
  modified_base 22: mod_base = OTHER; note = 2'-O-methyluridine-3'-phosphorothioate
  modified_base 23: mod_base = OTHER; note = 2'-O-methyladenosine
agtgttgtctggatagaggatta

SEQ ID NO: 350 - RNA, 23 nt, synthetic construct
  source 1..23: mol_type = other RNA
  modified_base 1: mod_base = OTHER; note = 2'-O-methyladenosine-3'-phosphorothioate
  modified_base 2: mod_base = OTHER; note = 2'-deoxy-2'-fluoroadenosine-3'-phosphorothioate
  modified_base 3: mod_base = OTHER; note = 2'-O-methylguanosine-3'-phosphate
  modified_base 4: mod_base = OTHER; note = 2'-O-methyladenosine-3'-phosphate
  modified_base 5: mod_base = OTHER; note = 2'-O-methylguanosine-3'-phosphate
  modified_base 6: mod_base = OTHER; note = 2'-deoxy-2'-fluorocytidine-3'-phosphate
  modified_base 7: mod_base = OTHER; note = 2'-O-methylguanosine-3'-phosphate
  modified_base 8: mod_base = OTHER; note = 2'-deoxy-2'-fluoroadenosine-3'-phosphate
  modified_base 9: mod_base = OTHER; note = 2'-deoxy-2'-fluoroguanosine-3'-phosphate
  modified_base 10: mod_base = OTHER; note = 2'-O-methyladenosine-3'-phosphate
  modified_base 11: mod_base = OTHER; note = 2'-O-methyluridine-3'-phosphate
  modified_base 12: mod_base = OTHER; note = 2'-O-methylcytidine-3'-phosphate
  modified_base 13: mod_base = OTHER; note = 2'-O-methyladenosine-3'-phosphate
  modified_base 14: mod_base = OTHER; note = 2'-deoxy-2'-fluorocytidine-3'-phosphate
  modified_base 15: mod_base = OTHER; note = 2'-O-methyladenosine-3'-phosphate
  modified_base 16: mod_base = OTHER; note = 2'-deoxy-2'-fluoroguanosine-3'-phosphate
  modified_base 17: mod_base = OTHER; note = 2'-O-methyladenosine-3'-phosphate
  modified_base 18: mod_base = OTHER; note = 2'-O-methyladenosine-3'-phosphate
  modified_base 19: mod_base = OTHER; note = 2'-O-methyluridine-3'-phosphate
  modified_base 20: mod_base = OTHER; note = 2'-O-methylcytidine-3'-phosphate
  modified_base 21: mod_base = OTHER; note = 2'-O-methyluridine-3'-phosphorothioate
  modified_base 22: mod_base = OTHER; note = 2'-O-methyluridine-3'-phosphorothioate
  modified_base 23: mod_base = OTHER; note = 2'-O-methylcytidine
aagagcgagatcacagaatcttc

SEQ ID NO: 351 - RNA, 23 nt, synthetic construct
  source 1..23: mol_type = other RNA
  modified_base 1: mod_base = OTHER; note = 2'-O-methyladenosine-3'-phosphorothioate
  modified_base 2: mod_base = OTHER; note = 2'-deoxy-2'-fluorouridine-3'-phosphorothioate
  modified_base 3: mod_base = OTHER; note = 2'-O-methylcytidine-3'-phosphate
  modified_base 4: mod_base = OTHER; note = 2'-O-methyluridine-3'-phosphate
  modified_base 5: mod_base = OTHER; note = 2'-O-methylcytidine-3'-phosphate
  modified_base 6: mod_base = OTHER; note = 2'-deoxy-2'-fluorocytidine-3'-phosphate
  modified_base 7: mod_base = OTHER; note = 2'-O-methyladenosine-3'-phosphate
  modified_base 8: mod_base = OTHER; note = 2'-deoxy-2'-fluoroadenosine-3'-phosphate
  modified_base 9: mod_base = OTHER; note = 2'-deoxy-2'-fluorocytidine-3'-phosphate
  modified_base 10: mod_base = OTHER; note = 2'-O-methyladenosine-3'-phosphate
  modified_base 11: mod_base = OTHER; note = 2'-O-methyluridine-3'-phosphate
  modified_base 12: mod_base = OTHER; note = 2'-O-methylguanosine-3'-phosphate
  modified_base 13: mod_base = OTHER; note = 2'-O-methylcytidine-3'-phosphate
  modified_base 14: mod_base = OTHER; note = 2'-deoxy-2'-fluorocytidine-3'-phosphate
  modified_base 15: mod_base = OTHER; note = 2'-O-methyluridine-3'-phosphate
  modified_base 16: mod_base = OTHER; note = 2'-deoxy-2'-fluorocytidine-3'-phosphate
  modified_base 17: mod_base = OTHER; note = 2'-O-methyluridine-3'-phosphate
  modified_base 18: mod_base = OTHER; note = 2'-O-methylcytidine-3'-phosphate
  modified_base 19: mod_base = OTHER; note = 2'-O-methyluridine-3'-phosphate
  modified_base 20: mod_base = OTHER; note = 2'-O-methyluridine-3'-phosphate
  modified_base 21: mod_base = OTHER; note = 2'-O-methylcytidine-3'-phosphorothioate
  modified_base 22: mod_base = OTHER; note = 2'-O-methyladenosine-3'-phosphorothioate
  modified_base 23: mod_base = OTHER; note = 2'-O-methyluridine
atctccaacatgcctctcttcat

SEQ ID NO: 352 - RNA, 23 nt, synthetic construct
  source 1..23: mol_type = other RNA
  modified_base 1: mod_base = OTHER; note = 2'-O-methyluridine-3'-phosphorothioate
  modified_base 2: mod_base = OTHER; note = 2'-deoxy-2'-fluorouridine-3'-phosphorothioate
  modified_base 3: mod_base = OTHER; note = 2'-O-methylcytidine-3'-phosphate
  modified_base 4: mod_base = OTHER; note = 2'-O-methyladenosine-3'-phosphate
  modified_base 5: mod_base = OTHER; note = 2'-O-methyluridine-3'-phosphate
  modified_base 6: mod_base = OTHER; note = 2'-deoxy-2'-fluorouridine-3'-phosphate
  modified_base 7: mod_base = OTHER; note = 2'-O-methyluridine-3'-phosphate
  modified_base 8: mod_base = OTHER; note = 2'-deoxy-2'-fluorocytidine-3'-phosphate
  modified_base 9: mod_base = OTHER; note = 2'-deoxy-2'-fluorocytidine-3'-phosphate
  modified_base 10: mod_base = OTHER; note = 2'-O-methyladenosine-3'-phosphate
  modified_base 11: mod_base = OTHER; note = 2'-O-methylcytidine-3'-phosphate
  modified_base 12: mod_base = OTHER; note = 2'-O-methylcytidine-3'-phosphate
  modified_base 13: mod_base = OTHER; note = 2'-O-methyluridine-3'-phosphate
  modified_base 14: mod_base = OTHER; note = 2'-deoxy-2'-fluorouridine-3'-phosphate
  modified_base 15: mod_base = OTHER; note = 2'-O-methyluridine-3'-phosphate
  modified_base 16: mod_base = OTHER; note = 2'-deoxy-2'-fluoroguanosine-3'-phosphate
  modified_base 17: mod_base = OTHER; note = 2'-O-methylcytidine-3'-phosphate
  modified_base 18: mod_base = OTHER; note = 2'-O-methylcytidine-3'-phosphate
  modified_base 19: mod_base = OTHER; note = 2'-O-methylcytidine-3'-phosphate
  modified_base 20: mod_base = OTHER; note = 2'-O-methyladenosine-3'-phosphate
  modified_base 21: mod_base = OTHER; note = 2'-O-methyladenosine-3'-phosphorothioate
  modified_base 22: mod_base = OTHER; note = 2'-O-methylguanosine-3'-phosphorothioate
  modified_base 23: mod_base = OTHER; note = 2'-O-methyluridine
ttcatttccacctttgcccaagt

SEQ ID NO: 353 - RNA, 23 nt, synthetic construct
  source 1..23: mol_type = other RNA
  modified_base 1: mod_base = OTHER; note = 2'-O-methyluridine-3'-phosphorothioate
  modified_base 2: mod_base = OTHER; note = 2'-deoxy-2'-fluorouridine-3'-phosphorothioate
  modified_base 3: mod_base = OTHER; note = 2'-O-methyluridine-3'-phosphate
  modified_base 4: mod_base = OTHER; note = 2'-O-methylcytidine-3'-phosphate
  modified_base 5: mod_base = OTHER; note = 2'-O-methylcytidine-3'-phosphate
  modified_base 6: mod_base = OTHER; note = 2'-deoxy-2'-fluorouridine-3'-phosphate
  modified_base 7: mod_base = OTHER; note = 2'-O-methyluridine-3'-phosphate
  modified_base 8: mod_base = OTHER; note = 2'-deoxy-2'-fluorocytidine-3'-phosphate
  modified_base 9: mod_base = OTHER; note = 2'-deoxy-2'-fluorouridine-3'-phosphate
  modified_base 10: mod_base = OTHER; note = 2'-O-methylguanosine-3'-phosphate
  modified_base 11: mod_base = OTHER; note = 2'-O-methylcytidine-3'-phosphate
  modified_base 12: mod_base = OTHER; note = 2'-O-methyluridine-3'-phosphate
  modified_base 13: mod_base = OTHER; note = 2'-O-methylcytidine-3'-phosphate
  modified_base 14: mod_base = OTHER; note = 2'-deoxy-2'-fluoroguanosine-3'-phosphate
  modified_base 15: mod_base = OTHER; note = 2'-O-methyladenosine-3'-phosphate
  modified_base 16: mod_base = OTHER; note = 2'-deoxy-2'-fluoroadenosine-3'-phosphate
  modified_base 17: mod_base = OTHER; note = 2'-O-methyladenosine-3'-phosphate
  modified_base 18: mod_base = OTHER; note = 2'-O-methyluridine-3'-phosphate
  modified_base 19: mod_base = OTHER; note = 2'-O-methyluridine-3'-phosphate
  modified_base 20: mod_base = OTHER; note = 2'-O-methylguanosine-3'-phosphate
  modified_base 21: mod_base = OTHER; note = 2'-O-methyladenosine-3'-phosphorothioate
  modified_base 22: mod_base = OTHER; note = 2'-O-methyluridine-3'-phosphorothioate
  modified_base 23: mod_base = OTHER; note = 2'-O-methylguanosine
tttccttctgctcgaaattgatg

SEQ ID NO: 354 - RNA, 23 nt, synthetic construct
  source 1..23: mol_type = other RNA
  modified_base 1: mod_base = OTHER; note = 2'-O-methyladenosine-3'-phosphorothioate
  modified_base 2: mod_base = OTHER; note = 2'-deoxy-2'-fluoroadenosine-3'-phosphorothioate
  modified_base 3: mod_base = OTHER; note = 2'-O-methyladenosine-3'-phosphate
  modified_base 4: mod_base = OTHER; note = 2'-O-methylguanosine-3'-phosphate
  modified_base 5: mod_base = OTHER; note = 2'-O-methyluridine-3'-phosphate
  modified_base 6: mod_base = OTHER; note = 2'-deoxy-2'-fluorocytidine-3'-phosphate
  modified_base 7: mod_base = OTHER; note = 2'-O-methyladenosine-3'-phosphate
  modified_base 8: mod_base = OTHER; note = 2'-deoxy-2'-fluorouridine-3'-phosphate
  modified_base 9: mod_base = OTHER; note = 2'-deoxy-2'-fluorocytidine-3'-phosphate
  modified_base 10: mod_base = OTHER; note = 2'-O-methyluridine-3'-phosphate
  modified_base 11: mod_base = OTHER; note = 2'-O-methylguanosine-3'-phosphate
  modified_base 12: mod_base = OTHER; note = 2'-O-methylcytidine-3'-phosphate
  modified_base 13: mod_base = OTHER; note = 2'-O-methyluridine-3'-phosphate
  modified_base 14: mod_base = OTHER; note = 2'-deoxy-2'-fluorouridine-3'-phosphate
  modified_base 15: mod_base = OTHER; note = 2'-O-methyluridine-3'-phosphate
  modified_base 16: mod_base = OTHER; note = 2'-deoxy-2'-fluorouridine-3'-phosphate
  modified_base 17: mod_base = OTHER; note = 2'-O-methyluridine-3'-phosphate
  modified_base 18: mod_base = OTHER; note = 2'-O-methylcytidine-3'-phosphate
  modified_base 19: mod_base = OTHER; note = 2'-O-methyladenosine-3'-phosphate
  modified_base 20: mod_base = OTHER; note = 2'-O-methyluridine-3'-phosphate
  modified_base 21: mod_base = OTHER; note = 2'-O-methylguanosine-3'-phosphorothioate
  modified_base 22: mod_base = OTHER; note = 2'-O-methylguanosine-3'-phosphorothioate
  modified_base 23: mod_base = OTHER; note = 2'-O-methyladenosine
aaagtcatctgctttttcatgga

SEQ ID NO: 355 - RNA, 23 nt, synthetic construct
  source 1..23: mol_type = other RNA
  modified_base 1: mod_base = OTHER; note = 2'-O-methyladenosine-3'-phosphorothioate
  modified_base 2: mod_base = OTHER; note = 2'-deoxy-2'-fluoroadenosine-3'-phosphorothioate
  modified_base 3: mod_base = OTHER; note = 2'-O-methylcytidine-3'-phosphate
  modified_base 4: mod_base = OTHER; note = 2'-O-methyluridine-3'-phosphate
  modified_base 5: mod_base = OTHER; note = 2'-O-methylguanosine-3'-phosphate
  modified_base 6: mod_base = OTHER; note = 2'-deoxy-2'-fluoroadenosine-3'-phosphate
  modified_base 7: mod_base = OTHER; note = 2'-O-methyluridine-3'-phosphate
  modified_base 8: mod_base = OTHER; note = 2'-deoxy-2'-fluoroguanosine-3'-phosphate
  modified_base 9: mod_base = OTHER; note = 2'-deoxy-2'-fluoroadenosine-3'-phosphate
  modified_base 10: mod_base = OTHER; note = 2'-O-methyladenosine-3'-phosphate
  modified_base 11: mod_base = OTHER; note = 2'-O-methylcytidine-3'-phosphate
  modified_base 12: mod_base = OTHER; note = 2'-O-methyladenosine-3'-phosphate
  modified_base 13: mod_base = OTHER; note = 2'-O-methyluridine-3'-phosphate
  modified_base 14: mod_base = OTHER; note = 2'-deoxy-2'-fluoroguanosine-3'-phosphate
  modified_base 15: mod_base = OTHER; note = 2'-O-methylguanosine-3'-phosphate
  modified_base 16: mod_base = OTHER; note = 2'-deoxy-2'-fluoroadenosine-3'-phosphate
  modified_base 17: mod_base = OTHER; note = 2'-O-methyladenosine-3'-phosphate
  modified_base 18: mod_base = OTHER; note = 2'-O-methyluridine-3'-phosphate
  modified_base 19: mod_base = OTHER; note = 2'-O-methylcytidine-3'-phosphate
  modified_base 20: mod_base = OTHER; note = 2'-O-methylcytidine-3'-phosphate
  modified_base 21: mod_base = OTHER; note = 2'-O-methyladenosine-3'-phosphorothioate
  modified_base 22: mod_base = OTHER; note = 2'-O-methyluridine-3'-phosphorothioate
  modified_base 23: mod_base = OTHER; note = 2'-O-methylguanosine
aactgatgaacatggaatccatg

SEQ ID NO: 356 - RNA, 23 nt, synthetic construct
  source 1..23: mol_type = other RNA
  modified_base 1: mod_base = OTHER; note = 2'-O-methyladenosine-3'-phosphorothioate
  modified_base 2: mod_base = OTHER; note = 2'-deoxy-2'-fluoroadenosine-3'-phosphorothioate
  modified_base 3: mod_base = OTHER; note = 2'-O-methylguanosine-3'-phosphate
  modified_base 4: mod_base = OTHER; note = 2'-O-methylguanosine-3'-phosphate
  modified_base 5: mod_base = OTHER; note = 2'-O-methyluridine-3'-phosphate
  modified_base 6: mod_base = OTHER; note = 2'-deoxy-2'-fluorocytidine-3'-phosphate
  modified_base 7: mod_base = OTHER; note = 2'-O-methyluridine-3'-phosphate
  modified_base 8: mod_base = OTHER; note = 2'-deoxy-2'-fluorocytidine-3'-phosphate
  modified_base 9: mod_base = OTHER; note = 2'-deoxy-2'-fluorocytidine-3'-phosphate
  modified_base 10: mod_base = OTHER; note = 2'-O-methyladenosine-3'-phosphate
  modified_base 11: mod_base = OTHER; note = 2'-O-methyladenosine-3'-phosphate
  modified_base 12: mod_base = OTHER; note = 2'-O-methylcytidine-3'-phosphate
  modified_base 13: mod_base = OTHER; note = 2'-O-methyladenosine-3'-phosphate
  modified_base 14: mod_base = OTHER; note = 2'-deoxy-2'-fluorouridine-3'-phosphate
  modified_base 15: mod_base = OTHER; note = 2'-O-methylguanosine-3'-phosphate
  modified_base 16: mod_base = OTHER; note = 2'-deoxy-2'-fluorocytidine-3'-phosphate
  modified_base 17: mod_base = OTHER; note = 2'-O-methylcytidine-3'-phosphate
  modified_base 18: mod_base = OTHER; note = 2'-O-methyluridine-3'-phosphate
  modified_base 19: mod_base = OTHER; note = 2'-O-methylcytidine-3'-phosphate
  modified_base 20: mod_base = OTHER; note = 2'-O-methyluridine-3'-phosphate
  modified_base 21: mod_base = OTHER; note = 2'-O-methylcytidine-3'-phosphorothioate
  modified_base 22: mod_base = OTHER; note = 2'-O-methyluridine-3'-phosphorothioate
  modified_base 23: mod_base = OTHER; note = 2'-O-methyluridine
aaggtctccaacatgcctctctt

SEQ ID NO: 357 - RNA, 23 nt, synthetic construct
  source 1..23: mol_type = other RNA
  modified_base 1: mod_base = OTHER; note = 2'-O-methyladenosine-3'-phosphorothioate
  modified_base 2: mod_base = OTHER; note = 2'-deoxy-2'-fluoroadenosine-3'-phosphorothioate
  modified_base 3: mod_base = OTHER; note = 2'-O-methylguanosine-3'-phosphate
  modified_base 4: mod_base = OTHER; note = 2'-O-methylcytidine-3'-phosphate
  modified_base 5: mod_base = OTHER; note = 2'-O-methylguanosine-3'-phosphate
  modified_base 6: mod_base = OTHER; note = 2'-deoxy-2'-fluoroadenosine-3'-phosphate
  modified_base 7: mod_base = OTHER; note = 2'-O-methylguanosine-3'-phosphate
  modified_base 8: mod_base = OTHER; note = 2'-deoxy-2'-fluoroadenosine-3'-phosphate
  modified_base 9: mod_base = OTHER; note = 2'-deoxy-2'-fluorouridine-3'-phosphate
  modified_base 10: mod_base = OTHER; note = 2'-O-methylcytidine-3'-phosphate
  modified_base 11: mod_base = OTHER; note = 2'-O-methyladenosine-3'-phosphate
  modified_base 12: mod_base = OTHER; note = 2'-O-methylcytidine-3'-phosphate
  modified_base 13: mod_base = OTHER; note = 2'-O-methyladenosine-3'-phosphate
  modified_base 14: mod_base = OTHER; note = 2'-deoxy-2'-fluoroguanosine-3'-phosphate
  modified_base 15: mod_base = OTHER; note = 2'-O-methyladenosine-3'-phosphate
  modified_base 16: mod_base = OTHER; note = 2'-deoxy-2'-fluoroadenosine-3'-phosphate
  modified_base 17: mod_base = OTHER; note = 2'-O-methyluridine-3'-phosphate
  modified_base 18: mod_base = OTHER; note = 2'-O-methylcytidine-3'-phosphate
  modified_base 19: mod_base = OTHER; note = 2'-O-methyluridine-3'-phosphate
  modified_base 20: mod_base = OTHER; note = 2'-O-methyluridine-3'-phosphate
  modified_base 21: mod_base = OTHER; note = 2'-O-methylcytidine-3'-phosphorothioate
  modified_base 22: mod_base = OTHER; note = 2'-O-methylguanosine-3'-phosphorothioate
  modified_base 23: mod_base = OTHER; note = 2'-O-methyladenosine
aagcgagatcacagaatcttcga

SEQ ID NO: 358 - RNA, 23 nt, synthetic construct
  source 1..23: mol_type = other RNA
  modified_base 1: mod_base = OTHER; note = 2'-O-methyluridine-3'-phosphorothioate
  modified_base 2: mod_base = OTHER; note = 2'-deoxy-2'-fluoroguanosine-3'-phosphorothioate
  modified_base 3: mod_base = OTHER; note = 2'-O-methyluridine-3'-phosphate
  modified_base 4: mod_base = OTHER; note = 2'-O-methylguanosine-3'-phosphate
  modified_base 5: mod_base = OTHER; note = 2'-O-methyluridine-3'-phosphate
  modified_base 6: mod_base = OTHER; note = 2'-deoxy-2'-fluoroadenosine-3'-phosphate
  modified_base 7: mod_base = OTHER; note = 2'-O-methyluridine-3'-phosphate
  modified_base 8: mod_base = OTHER; note = 2'-deoxy-2'-fluorouridine-3'-phosphate
  modified_base 9: mod_base = OTHER; note = 2'-deoxy-2'-fluoroadenosine-3'-phosphate
  modified_base 10: mod_base = OTHER; note = 2'-O-methyluridine-3'-phosphate
  modified_base 11: mod_base = OTHER; note = 2'-O-methylcytidine-3'-phosphate
  modified_base 12: mod_base = OTHER; note = 2'-O-methyluridine-3'-phosphate
  modified_base 13: mod_base = OTHER; note = 2'-O-methylcytidine-3'-phosphate
  modified_base 14: mod_base = OTHER; note = 2'-deoxy-2'-fluorocytidine-3'-phosphate
  modified_base 15: mod_base = OTHER; note = 2'-O-methyladenosine-3'-phosphate
  modified_base 16: mod_base = OTHER; note = 2'-deoxy-2'-fluoroadenosine-3'-phosphate
  modified_base 17: mod_base = OTHER; note = 2'-O-methyladenosine-3'-phosphate
  modified_base 18: mod_base = OTHER; note = 2'-O-methylcytidine-3'-phosphate
  modified_base 19: mod_base = OTHER; note = 2'-O-methyluridine-3'-phosphate
  modified_base 20: mod_base = OTHER; note = 2'-O-methylguanosine-3'-phosphate
  modified_base 21: mod_base = OTHER; note = 2'-O-methyladenosine-3'-phosphorothioate
  modified_base 22: mod_base = OTHER; note = 2'-O-methyluridine-3'-phosphorothioate
  modified_base 23: mod_base = OTHER; note = 2'-O-methylguanosine
tgtgtattatctccaaactgatg

SEQ ID NO: 359 - RNA, 23 nt, synthetic construct
  source 1..23: mol_type = other RNA
  modified_base 1: mod_base = OTHER; note = 2'-O-methyladenosine-3'-phosphorothioate
  modified_base 2: mod_base = OTHER; note = 2'-deoxy-2'-fluoroadenosine-3'-phosphorothioate
  modified_base 3: mod_base = OTHER; note = 2'-O-methyladenosine-3'-phosphate
  modified_base 4: mod_base = OTHER; note = 2'-O-methyluridine-3'-phosphate
  modified_base 5: mod_base = OTHER; note = 2'-O-methylcytidine-3'-phosphate
  modified_base 6: mod_base = OTHER; note = 2'-deoxy-2'-fluorouridine-3'-phosphate
  modified_base 7: mod_base = OTHER; note = 2'-O-methyluridine-3'-phosphate
  modified_base 8: mod_base = OTHER; note = 2'-deoxy-2'-fluorocytidine-3'-phosphate
  modified_base 9: mod_base = OTHER; note = 2'-deoxy-2'-fluoroguanosine-3'-phosphate
  modified_base 10: mod_base = OTHER; note = 2'-O-methyladenosine-3'-phosphate
  modified_base 11: mod_base = OTHER; note = 2'-O-methyladenosine-3'-phosphate
  modified_base 12: mod_base = OTHER; note = 2'-O-methyladenosine-3'-phosphate
  modified_base 13: mod_base = OTHER; note = 2'-O-methylguanosine-3'-phosphate
  modified_base 14: mod_base = OTHER; note = 2'-deoxy-2'-fluoroadenosine-3'-phosphate
  modified_base 15: mod_base = OTHER; note = 2'-O-methylcytidine-3'-phosphate
  modified_base 16: mod_base = OTHER; note = 2'-deoxy-2'-fluoroadenosine-3'-phosphate
  modified_base 17: mod_base = OTHER; note = 2'-O-methylcytidine-3'-phosphate
  modified_base 18: mod_base = OTHER; note = 2'-O-methylcytidine-3'-phosphate
  modified_base 19: mod_base = OTHER; note = 2'-O-methyluridine-3'-phosphate
  modified_base 20: mod_base = OTHER; note = 2'-O-methyluridine-3'-phosphate
  modified_base 21: mod_base = OTHER; note = 2'-O-methylguanosine-3'-phosphorothioate
  modified_base 22: mod_base = OTHER; note = 2'-O-methylguanosine-3'-phosphorothioate
  modified_base 23: mod_base = OTHER; note = 2'-O-methylcytidine
aaatcttcgaaagacaccttggc

SEQ ID NO: 360 - RNA, 23 nt, synthetic construct
  source 1..23: mol_type = other RNA
  modified_base 1: mod_base = OTHER; note = 2'-O-methyluridine-3'-phosphorothioate
  modified_base 2: mod_base = OTHER; note = 2'-deoxy-2'-fluoroadenosine-3'-phosphorothioate
  modified_base 3: mod_base = OTHER; note = 2'-O-methyluridine-3'-phosphate
  modified_base 4: mod_base = OTHER; note = 2'-O-methylcytidine-3'-phosphate
  modified_base 5: mod_base = OTHER; note = 2'-O-methyluridine-3'-phosphate
  modified_base 6: mod_base = OTHER; note = 2'-deoxy-2'-fluorocytidine-3'-phosphate
  modified_base 7: mod_base = OTHER; note = 2'-O-methylcytidine-3'-phosphate
  modified_base 8: mod_base = OTHER; note = 2'-deoxy-2'-fluoroadenosine-3'-phosphate
  modified_base 9: mod_base = OTHER; note = 2'-deoxy-2'-fluoroadenosine-3'-phosphate
  modified_base 10: mod_base = OTHER; note = 2'-O-methyladenosine-3'-phosphate
  modified_base 11: mod_base = OTHER; note = 2'-O-methylcytidine-3'-phosphate
  modified_base 12: mod_base = OTHER; note = 2'-O-methyluridine-3'-phosphate
  modified_base 13: mod_base = OTHER; note = 2'-O-methylguanosine-3'-phosphate
  modified_base 14: mod_base = OTHER; note = 2'-deoxy-2'-fluoroadenosine-3'-phosphate
  modified_base 15: mod_base = OTHER; note = 2'-O-methyluridine-3'-phosphate
  modified_base 16: mod_base = OTHER; note = 2'-deoxy-2'-fluoroguanosine-3'-phosphate
  modified_base 17: mod_base = OTHER; note = 2'-O-methyladenosine-3'-phosphate
  modified_base 18: mod_base = OTHER; note = 2'-O-methyladenosine-3'-phosphate
  modified_base 19: mod_base = OTHER; note = 2'-O-methylcytidine-3'-phosphate
  modified_base 20: mod_base = OTHER; note = 2'-O-methyladenosine-3'-phosphate
  modified_base 21: mod_base = OTHER; note = 2'-O-methyluridine-3'-phosphorothioate
  modified_base 22: mod_base = OTHER; note = 2'-O-methylguanosine-3'-phosphorothioate
  modified_base 23: mod_base = OTHER; note = 2'-O-methylguanosine
tatctccaaactgatgaacatgg

SEQ ID NO: 361 - RNA, 23 nt, synthetic construct
  source 1..23: mol_type = other RNA
  modified_base 1: mod_base = OTHER; note = 2'-O-methyladenosine-3'-phosphorothioate
  modified_base 2: mod_base = OTHER; note = 2'-deoxy-2'-fluorouridine-3'-phosphorothioate
  modified_base 3: mod_base = OTHER; note = 2'-O-methyluridine-3'-phosphate
  modified_base 4: mod_base = OTHER; note = 2'-O-methylcytidine-3'-phosphate
  modified_base 5: mod_base = OTHER; note = 2'-O-methyluridine-3'-phosphate
  modified_base 6: mod_base = OTHER; note = 2'-deoxy-2'-fluoroguanosine-3'-phosphate
  modified_base 7: mod_base = OTHER; note = 2'-O-methylcytidine-3'-phosphate
  modified_base 8: mod_base = OTHER; note = 2'-deoxy-2'-fluorouridine-3'-phosphate
  modified_base 9: mod_base = OTHER; note = 2'-deoxy-2'-fluorocytidine-3'-phosphate
  modified_base 10: mod_base = OTHER; note = 2'-O-methylguanosine-3'-phosphate
  modified_base 11: mod_base = OTHER; note = 2'-O-methyladenosine-3'-phosphate
  modified_base 12: mod_base = OTHER; note = 2'-O-methyladenosine-3'-phosphate
  modified_base 13: mod_base = OTHER; note = 2'-O-methyladenosine-3'-phosphate
  modified_base 14: mod_base = OTHER; note = 2'-deoxy-2'-fluorouridine-3'-phosphate
  modified_base 15: mod_base = OTHER; note = 2'-O-methyluridine-3'-phosphate
  modified_base 16: mod_base = OTHER; note = 2'-deoxy-2'-fluoroguanosine-3'-phosphate
  modified_base 17: mod_base = OTHER; note = 2'-O-methyladenosine-3'-phosphate
  modified_base 18: mod_base = OTHER; note = 2'-O-methyluridine-3'-phosphate
  modified_base 19: mod_base = OTHER; note = 2'-O-methylguanosine-3'-phosphate
  modified_base 20: mod_base = OTHER; note = 2'-O-methylguanosine-3'-phosphate
  modified_base 21: mod_base = OTHER; note = 2'-O-methyluridine-3'-phosphorothioate
  modified_base 22: mod_base = OTHER; note = 2'-O-methylguanosine-3'-phosphorothioate
  modified_base 23: mod_base = OTHER; note = 2'-O-methylcytidine
attctgctcgaaattgatggtgc

SEQ ID NO: 362 - RNA, 23 nt, synthetic construct
  source 1..23: mol_type = other RNA
  modified_base 1: mod_base = OTHER; note = 2'-O-methyladenosine-3'-phosphorothioate
  modified_base 2: mod_base = OTHER; note = 2'-deoxy-2'-fluoroadenosine-3'-phosphorothioate
  modified_base 3: mod_base = OTHER; note = 2'-O-methyluridine-3'-phosphate
  modified_base 4: mod_base = OTHER; note = 2'-O-methylcytidine-3'-phosphate
  modified_base 5: mod_base = OTHER; note = 2'-O-methyluridine-3'-phosphate
  modified_base 6: mod_base = OTHER; note = 2'-deoxy-2'-fluorouridine-3'-phosphate
  modified_base 7: mod_base = OTHER; note = 2'-O-methyluridine-3'-phosphate
  modified_base 8: mod_base = OTHER; note = 2'-deoxy-2'-fluoroguanosine-3'-phosphate
  modified_base 9: mod_base = OTHER; note = 2'-deoxy-2'-fluorocytidine-3'-phosphate
  modified_base 10: mod_base = OTHER; note = 2'-O-methylcytidine-3'-phosphate
  modified_base 11: mod_base = OTHER; note = 2'-O-methyladenosine-3'-phosphate
  modified_base 12: mod_base = OTHER; note = 2'-O-methylguanosine-3'-phosphate
  modified_base 13: mod_base = OTHER; note = 2'-O-methylcytidine-3'-phosphate
  modified_base 14: mod_base = OTHER; note = 2'-deoxy-2'-fluoroadenosine-3'-phosphate
  modified_base 15: mod_base = OTHER; note = 2'-O-methylguanosine-3'-phosphate
  modified_base 16: mod_base = OTHER; note = 2'-deoxy-2'-fluorouridine-3'-phosphate
  modified_base 17: mod_base = OTHER; note = 2'-O-methylcytidine-3'-phosphate
  modified_base 18: mod_base = OTHER; note = 2'-O-methyladenosine-3'-phosphate
  modified_base 19: mod_base = OTHER; note = 2'-O-methylcytidine-3'-phosphate
  modified_base 20: mod_base = OTHER; note = 2'-O-methyladenosine-3'-phosphate
  modified_base 21: mod_base = OTHER; note = 2'-O-methyluridine-3'-phosphorothioate
  modified_base 22: mod_base = OTHER; note = 2'-O-methyluridine-3'-phosphorothioate
  modified_base 23: mod_base = OTHER; note = 2'-O-methylguanosine
aatctttgccagcagtcacattg

SEQ ID NO: 363 - RNA, 23 nt, synthetic construct
  source 1..23: mol_type = other RNA
  modified_base 1: mod_base = OTHER; note = 2'-O-methyluridine-3'-phosphorothioate
  modified_base 2: mod_base = OTHER; note = 2'-deoxy-2'-fluorouridine-3'-phosphorothioate
  modified_base 3: mod_base = OTHER; note = 2'-O-methyluridine-3'-phosphate
  modified_base 4: mod_base = OTHER; note = 2'-O-methyladenosine-3'-phosphate
  modified_base 5: mod_base = OTHER; note = 2'-O-methylcytidine-3'-phosphate
  modified_base 6: mod_base = OTHER; note = 2'-deoxy-2'-fluorouridine-3'-phosphate
  modified_base 7: mod_base = OTHER; note = 2'-O-methyluridine-3'-phosphate
  modified_base 8: mod_base = OTHER; note = 2'-deoxy-2'-fluorouridine-3'-phosphate
  modified_base 9: mod_base = OTHER; note = 2'-deoxy-2'-fluorocytidine-3'-phosphate
  modified_base 10: mod_base = OTHER; note = 2'-O-methyluridine-3'-phosphate
  modified_base 11: mod_base = OTHER; note = 2'-O-methyluridine-3'-phosphate
  modified_base 12: mod_base = OTHER; note = 2'-O-methylcytidine-3'-phosphate
  modified_base 13: mod_base = OTHER; note = 2'-O-methyladenosine-3'-phosphate
  modified_base 14: mod_base = OTHER; note = 2'-deoxy-2'-fluorouridine-3'-phosphate
  modified_base 15: mod_base = OTHER; note = 2'-O-methyluridine-3'-phosphate
  modified_base 16: mod_base = OTHER; note = 2'-deoxy-2'-fluorouridine-3'-phosphate
  modified_base 17: mod_base = OTHER; note = 2'-O-methylcytidine-3'-phosphate
  modified_base 18: mod_base = OTHER; note = 2'-O-methylcytidine-3'-phosphate
  modified_base 19: mod_base = OTHER; note = 2'-O-methyladenosine-3'-phosphate
  modified_base 20: mod_base = OTHER; note = 2'-O-methylcytidine-3'-phosphate
  modified_base 21: mod_base = OTHER; note = 2'-O-methylcytidine-3'-phosphorothioate
  modified_base 22: mod_base = OTHER; note = 2'-O-methyluridine-3'-phosphorothioate
  modified_base 23: mod_base = OTHER; note = 2'-O-methyluridine
tttactttcttcatttccacctt

SEQ ID NO: 364 - RNA, 23 nt, synthetic construct
  source 1..23: mol_type = other RNA
  modified_base 1: mod_base = OTHER; note = 2'-O-methyladenosine-3'-phosphorothioate
  modified_base 2: mod_base = OTHER; note = 2'-deoxy-2'-fluoroadenosine-3'-phosphorothioate
  modified_base 3: mod_base = OTHER; note = 2'-O-methyladenosine-3'-phosphate
  modified_base 4: mod_base = OTHER; note = 2'-O-methylcytidine-3'-phosphate
  modified_base 5: mod_base = OTHER; note = 2'-O-methyluridine-3'-phosphate
  modified_base 6: mod_base = OTHER; note = 2'-deoxy-2'-fluoroguanosine-3'-phosphate
  modified_base 7: mod_base = OTHER; note = 2'-O-methyladenosine-3'-phosphate
  modified_base 8: mod_base = OTHER; note = 2'-deoxy-2'-fluorouridine-3'-phosphate
  modified_base 9: mod_base = OTHER; note = 2'-deoxy-2'-fluoroguanosine-3'-phosphate
  modified_base 10: mod_base = OTHER; note = 2'-O-methyladenosine-3'-phosphate
  modified_base 11: mod_base = OTHER; note = 2'-O-methyladenosine-3'-phosphate
  modified_base 12: mod_base = OTHER; note = 2'-O-methylcytidine-3'-phosphate
  modified_base 13: mod_base = OTHER; note = 2'-O-methyladenosine-3'-phosphate
  modified_base 14: mod_base = OTHER; note = 2'-deoxy-2'-fluorouridine-3'-phosphate
  modified_base 15: mod_base = OTHER; note = 2'-O-methylguanosine-3'-phosphate
  modified_base 16: mod_base = OTHER; note = 2'-deoxy-2'-fluoroguanosine-3'-phosphate
  modified_base 17: mod_base = OTHER; note = 2'-O-methyladenosine-3'-phosphate
  modified_base 18: mod_base = OTHER; note = 2'-O-methyladenosine-3'-phosphate
  modified_base 19: mod_base = OTHER; note = 2'-O-methyluridine-3'-phosphate
  modified_base 20: mod_base = OTHER; note = 2'-O-methylcytidine-3'-phosphate
  modified_base 21: mod_base = OTHER; note = 2'-O-methylcytidine-3'-phosphorothioate
  modified_base 22: mod_base = OTHER; note = 2'-O-methyladenosine-3'-phosphorothioate
  modified_base 23: mod_base = OTHER; note = 2'-O-methyluridine
aaactgatgaacatggaatccat

SEQ ID NO: 365 - RNA, 23 nt, synthetic construct
  source 1..23: mol_type = other RNA
  modified_base 1: mod_base = OTHER; note = 2'-O-methyladenosine-3'-phosphorothioate
  modified_base 2: mod_base = OTHER; note = 2'-deoxy-2'-fluorouridine-3'-phosphorothioate
  modified_base 3: mod_base = OTHER; note = 2'-O-methylcytidine-3'-phosphate
  modified_base 4: mod_base = OTHER; note = 2'-O-methyluridine-3'-phosphate
  modified_base 5: mod_base = OTHER; note = 2'-O-methyluridine-3'-phosphate
  modified_base 6: mod_base = OTHER; note = 2'-deoxy-2'-fluorouridine-3'-phosphate
  modified_base 7: mod_base = OTHER; note = 2'-O-methylguanosine-3'-phosphate
  modified_base 8: mod_base = OTHER; note = 2'-deoxy-2'-fluorocytidine-3'-phosphate
  modified_base 9: mod_base = OTHER; note = 2'-deoxy-2'-fluorocytidine-3'-phosphate
  modified_base 10: mod_base = OTHER; note = 2'-O-methyladenosine-3'-phosphate
  modified_base 11: mod_base = OTHER; note = 2'-O-methylguanosine-3'-phosphate
  modified_base 12: mod_base = OTHER; note = 2'-O-methylcytidine-3'-phosphate
  modified_base 13: mod_base = OTHER; note = 2'-O-methyladenosine-3'-phosphate
  modified_base 14: mod_base = OTHER; note = 2'-deoxy-2'-fluoroguanosine-3'-phosphate
  modified_base 15: mod_base = OTHER; note = 2'-O-methyluridine-3'-phosphate
  modified_base 16: mod_base = OTHER; note = 2'-deoxy-2'-fluorocytidine-3'-phosphate
  modified_base 17: mod_base = OTHER; note = 2'-O-methyladenosine-3'-phosphate
  modified_base 18: mod_base = OTHER; note = 2'-O-methylcytidine-3'-phosphate
  modified_base 19: mod_base = OTHER; note = 2'-O-methyladenosine-3'-phosphate
  modified_base 20: mod_base = OTHER; note = 2'-O-methyluridine-3'-phosphate
  modified_base 21: mod_base = OTHER; note = 2'-O-methyluridine-3'-phosphorothioate
  modified_base 22: mod_base = OTHER; note = 2'-O-methylguanosine-3'-phosphorothioate
  modified_base 23: mod_base = OTHER; note = 2'-O-methylcytidine
atctttgccagcagtcacattgc

SEQ ID NO: 366 - RNA, 23 nt, synthetic construct
  source 1..23: mol_type = other RNA
  modified_base 1: mod_base = OTHER; note = 2'-O-methyladenosine-3'-phosphorothioate
  modified_base 2: mod_base = OTHER; note = 2'-deoxy-2'-fluorouridine-3'-phosphorothioate
  modified_base 3: mod_base = OTHER; note = 2'-O-methylcytidine-3'-phosphate
  modified_base 4: mod_base = OTHER; note = 2'-O-methyladenosine-3'-phosphate
  modified_base 5: mod_base = OTHER; note = 2'-O-methyluridine-3'-phosphate
  modified_base 6: mod_base = OTHER; note = 2'-deoxy-2'-fluorocytidine-3'-phosphate
  modified_base 7: mod_base = OTHER; note = 2'-O-methyluridine-3'-phosphate
  modified_base 8: mod_base = OTHER; note = 2'-deoxy-2'-fluoroguanosine-3'-phosphate
  modified_base 9: mod_base = OTHER; note = 2'-deoxy-2'-fluorocytidine-3'-phosphate
  modified_base 10: mod_base = OTHER; note = 2'-O-methyluridine-3'-phosphate
  modified_base 11: mod_base = OTHER; note = 2'-O-methyluridine-3'-phosphate
  modified_base 12: mod_base = OTHER; note = 2'-O-methyluridine-3'-phosphate
  modified_base 13: mod_base = OTHER; note = 2'-O-methyluridine-3'-phosphate
  modified_base 14: mod_base = OTHER; note = 2'-deoxy-2'-fluorouridine-3'-phosphate
  modified_base 15: mod_base = OTHER; note = 2'-O-methylcytidine-3'-phosphate
  modified_base 16: mod_base = OTHER; note = 2'-deoxy-2'-fluoroadenosine-3'-phosphate
  modified_base 17: mod_base = OTHER; note = 2'-O-methyluridine-3'-phosphate
  modified_base 18: mod_base = OTHER; note = 2'-O-methylguanosine-3'-phosphate
  modified_base 19: mod_base = OTHER; note = 2'-O-methylguanosine-3'-phosphate
  modified_base 20: mod_base = OTHER; note = 2'-O-methyladenosine-3'-phosphate
  modified_base 21: mod_base = OTHER; note = 2'-O-methylcytidine-3'-phosphorothioate
  modified_base 22: mod_base = OTHER; note = 2'-O-methylcytidine-3'-phosphorothioate
  modified_base 23: mod_base = OTHER; note = 2'-O-methyladenosine
atcatctgctttttcatggacca

SEQ ID NO: 367 - RNA, 23 nt, synthetic construct
  source 1..23: mol_type = other RNA
tcatcagtttggagataatacac

SEQ ID NO: 368 - RNA, 23 nt, synthetic construct
  source 1..23: mol_type = other RNA
tgtctttcgaagattctgtgatc

SEQ ID NO: 369 - RNA, 23 nt, synthetic construct
  source 1..23: mol_type = other RNA
caaggtgtctttcgaagattctg

SEQ ID NO: 370 - RNA, 23 nt, synthetic construct
  source 1..23: mol_type = other RNA
cactttaatcctctatccagaca

SEQ ID NO: 371 - RNA, 23 nt, synthetic construct
  source 1..23: mol_type = other RNA
agtgcaggtcctcactttaatcc

SEQ ID NO: 372 - RNA, 23 nt, synthetic construct
  source 1..23: mol_type = other RNA
gtgtctttcgaagattctgtgat

SEQ ID NO: 373 - RNA, 23 nt, synthetic construct
  source 1..23: mol_type = other RNA
tgcaggtcctcactttaatcctc

SEQ ID NO: 374 - RNA, 23 nt, synthetic construct
  source 1..23: mol_type = other RNA
gtcctcactttaatcctctatcc

SEQ ID NO: 375 - RNA, 23 nt, synthetic construct
  source 1..23: mol_type = other RNA
gtaccagtgcaggtcctcacttt

SEQ ID NO: 376 - RNA, 23 nt, synthetic construct
  source 1..23: mol_type = other RNA
aaagcagatgacttgggcaaagg

SEQ ID NO: 377 - RNA, 23 nt, synthetic construct
  source 1..23: mol_type = other RNA
atgaaaaagcagatgacttgggc

SEQ ID NO: 378 - RNA, 23 nt, synthetic construct
  source 1..23: mol_type = other RNA
atttcgagcagaaggaaagtaat

SEQ ID NO: 379 - RNA, 23 nt, synthetic construct
  source 1..23: mol_type = other RNA
caatttcgagcagaaggaaagta

SEQ ID NO: 380 - RNA, 23 nt, synthetic construct
  source 1..23: mol_type = other RNA
atcagtttggagataatacacaa

SEQ ID NO: 381 - RNA, 23 nt, synthetic construct
  source 1..23: mol_type = other RNA
tgttcatcagtttggagataata

SEQ ID NO: 382 - RNA, 23 nt, synthetic construct
  source 1..23: mol_type = other RNA
tcctcactttaatcctctatcca

SEQ ID NO: 383 - RNA, 23 nt, synthetic construct
  source 1..23: mol_type = other RNA
ctttcgaagattctgtgatctcg

SEQ ID NO: 384 - RNA, 23 nt, synthetic construct
  source 1..23: mol_type = other RNA
aaaagcagatgacttgggcaaag

SEQ ID NO: 385 - RNA, 23 nt, synthetic construct
  source 1..23: mol_type = other RNA
caggtcctcactttaatcctcta

SEQ ID NO: 386 - RNA, 23 nt, synthetic construct
  source 1..23: mol_type = other RNA
accagtgcaggtcctcactttaa

SEQ ID NO: 387 - RNA, 23 nt, synthetic construct
  source 1..23: mol_type = other RNA
agcattacaggattgactgaagg

SEQ ID NO: 388 - RNA, 23 nt, synthetic construct
  source 1..23: mol_type = other RNA
agaaagtaaaaagacaggaaacg

SEQ ID NO: 389 - RNA, 23 nt, synthetic construct
  source 1..23: mol_type = other RNA
tcagtttggagataatacacaag

SEQ ID NO: 390 - RNA, 23 nt, synthetic construct
  source 1..23: mol_type = other RNA
ttcgaagattctgtgatctcgct

SEQ ID NO: 391 - RNA, 23 nt, synthetic construct
  source 1..23: mol_type = other RNA
aagcattacaggattgactgaag

SEQ ID NO: 392 - RNA, 23 nt, synthetic construct
  source 1..23: mol_type = other RNA
gttcatcagtttggagataatac

SEQ ID NO: 393 - RNA, 23 nt, synthetic construct
  source 1..23: mol_type = other RNA
tcactttaatcctctatccagac

SEQ ID NO: 394 - RNA, 23 nt, synthetic construct
  source 1..23: mol_type = other RNA
aagtaaaaagacaggaaacgctg

SEQ ID NO: 395 - RNA, 23 nt, synthetic construct
  source 1..23: mol_type = other RNA
ccatcaatttcgagcagaaggaa

SEQ ID NO: 396 - RNA, 23 nt, synthetic construct
  source 1..23: mol_type = other RNA
ggtcctcactttaatcctctatc

SEQ ID NO: 397 - RNA, 23 nt, synthetic construct
  source 1..23: mol_type = other RNA
aggtcctcactttaatcctctat

SEQ ID NO: 398 - RNA, 23 nt, synthetic construct
  source 1..23: mol_type = other RNA
ttcatcagtttggagataataca

SEQ ID NO: 399 - RNA, 23 nt, synthetic construct
  source 1..23: mol_type = other RNA
gaaagtaaaaagacaggaaacgc

SEQ ID NO: 400 - RNA, 23 nt, synthetic construct
  source 1..23: mol_type = other RNA
gaagcattacaggattgactgaa

SEQ ID NO: 401 - RNA, 23 nt, synthetic construct
  source 1..23: mol_type = other RNA
agattctgtgatctcgctctcag

SEQ ID NO: 402 - RNA, 23 nt, synthetic construct
  source 1..23: mol_type = other RNA
atgttcatcagtttggagataat

SEQ ID NO: 403 - RNA, 23 nt, synthetic construct
  source 1..23: mol_type = other RNA
ctcactttaatcctctatccaga

SEQ ID NO: 404 - RNA, 23 nt, synthetic construct
  source 1..23: mol_type = other RNA
aggtgtctttcgaagattctgtg

SEQ ID NO: 405 - RNA, 23 nt, synthetic construct
  source 1..23: mol_type = other RNA
ttcgagcagaaggaaagtaatgg

SEQ ID NO: 406 - RNA, 23 nt, synthetic construct
  source 1..23: mol_type = other RNA
attccatgttcatcagtttggag

SEQ ID NO: 407 - RNA, 23 nt, synthetic construct
  source 1..23: mol_type = other RNA
taccagtgcaggtcctcacttta

SEQ ID NO: 408 - RNA, 23 nt, synthetic construct
  source 1..23: mol_type = other RNA
gcaggtcctcactttaatcctct

SEQ ID NO: 409 - RNA, 23 nt, synthetic construct
  source 1..23: mol_type = other RNA
tggccaaggtgtctttcgaagat

SEQ ID NO: 410 - RNA, 23 nt, synthetic construct
  source 1..23: mol_type = other RNA
aaagtaaaaagacaggaaacgct

SEQ ID NO: 411 - RNA, 23 nt, synthetic construct
  source 1..23: mol_type = other RNA
taatacacaaggctgtaccagtg

SEQ ID NO: 412 - RNA, 23 nt, synthetic construct
  source 1..23: mol_type = other RNA
ttaatcctctatccagacaacac

SEQ ID NO: 413 - RNA, 23 nt, synthetic construct
  source 1..23: mol_type = other RNA
tttcgagcagaaggaaagtaatg

SEQ ID NO: 414 - RNA, 23 nt, synthetic construct
  source 1..23: mol_type = other RNA
cctcactttaatcctctatccag

SEQ ID NO: 415 - RNA, 23 nt, synthetic construct
  source 1..23: mol_type = other RNA
agcagaaggaaagtaatggacca

SEQ ID NO: 416 - RNA, 23 nt, synthetic construct
  source 1..23: mol_type = other RNA
atcaatttcgagcagaaggaaag

SEQ ID NO: 417 - RNA, 23 nt, synthetic construct
  source 1..23: mol_type = other RNA
agaaggaaagtaatggaccagtg

SEQ ID NO: 418 - RNA, 23 nt, synthetic construct
  source 1..23: mol_type = other RNA
ccagtgcaggtcctcactttaat

SEQ ID NO: 419 - RNA, 23 nt, synthetic construct
  source 1..23: mol_type = other RNA
tggattccatgttcatcagtttg

SEQ ID NO: 420 - RNA, 23 nt, synthetic construct
  source 1..23: mol_type = other RNA
gtctttcgaagattctgtgatct

SEQ ID NO: 421 - RNA, 23 nt, synthetic construct
  source 1..23: mol_type = other RNA
aatttcgagcagaaggaaagtaa

SEQ ID NO: 422 - RNA, 23 nt, synthetic construct
  source 1..23: mol_type = other RNA
tttaatcctctatccagacaaca

SEQ ID NO: 423 - RNA, 23 nt, synthetic construct
  source 1..23: mol_type = other RNA
catgttcatcagtttggagataa

SEQ ID NO: 424 - RNA, 23 nt, synthetic construct
  source 1..23: mol_type = other RNA
cagtgcaggtcctcactttaatc

SEQ ID NO: 425 - RNA, 23 nt, synthetic construct
  source 1..23: mol_type = other RNA
agtaatggaccagtgaaggtgtg

SEQ ID NO: 426 - RNA, 23 nt, synthetic construct
  source 1..23: mol_type = other RNA
ctttaatcctctatccagacaac

SEQ ID NO: 427 - RNA, 23 nt, synthetic construct
  source 1..23: mol_type = other RNA
tctcaggagaccattccatcatt

SEQ ID NO: 428 - RNA, 23 nt, synthetic construct
  source 1..23: mol_type = other RNA
ggcaccatcaatttcgagcagaa

SEQ ID NO: 429 - RNA, 23 nt, synthetic construct
  source 1..23: mol_type = other RNA
gtgcaggtcctcactttaatcct

SEQ ID NO: 430 - RNA, 23 nt, synthetic construct
  source 1..23: mol_type = other RNA
tctttcgaagattctgtgatctc

SEQ ID NO: 431 - RNA, 23 nt, synthetic construct
  source 1..23: mol_type = other RNA
cctgcatggattccatgttcatc

SEQ ID NO: 432 - RNA, 23 nt, synthetic construct
  source 1..23: mol_type = other RNA
taatcctctatccagacaacacg

SEQ ID NO: 433 - RNA, 23 nt, synthetic construct
  source 1..23: mol_type = other RNA
gaagattctgtgatctcgctctc

SEQ ID NO: 434 - RNA, 23 nt, synthetic construct
  source 1..23: mol_type = other RNA
atgaagagaggcatgttggagac

SEQ ID NO: 435 - RNA, 23 nt, synthetic construct
  source 1..23: mol_type = other RNA
acttgggcaaaggtggaaatgaa

SEQ ID NO: 436 - RNA, 23 nt, synthetic construct
  source 1..23: mol_type = other RNA
catcaatttcgagcagaaggaaa

SEQ ID NO: 437 - RNA, 23 nt, synthetic construct
  source 1..23: mol_type = other RNA
tccatgaaaaagcagatgacttg

SEQ ID NO: 438 - RNA, 23 nt, synthetic construct
  source 1..23: mol_type = other RNA
catggattccatgttcatcagtt

SEQ ID NO: 439 - RNA, 23 nt, synthetic construct
  source 1..23: mol_type = other RNA
aagagaggcatgttggagacctg

SEQ ID NO: 440 - RNA, 23 nt, synthetic construct
  source 1..23: mol_type = other RNA
tcgaagattctgtgatctcgctc

SEQ ID NO: 441 - RNA, 23 nt, synthetic construct
  source 1..23: mol_type = other RNA
catcagtttggagataatacaca

SEQ ID NO: 442 - RNA, 23 nt, synthetic construct
  source 1..23: mol_type = other RNA
gccaaggtgtctttcgaagattc

SEQ ID NO: 443 - RNA, 23 nt, synthetic construct
  source 1..23: mol_type = other RNA
ccatgttcatcagtttggagata

SEQ ID NO: 444 - RNA, 23 nt, synthetic construct
  source 1..23: mol_type = other RNA
gcaccatcaatttcgagcagaag

SEQ ID NO: 445 - RNA, 23 nt, synthetic construct
  source 1..23: mol_type = other RNA
caatgtgactgctggcaaagatg

SEQ ID NO: 446 - RNA, 23 nt, synthetic construct
  source 1..23: mol_type = other RNA
aaggtggaaatgaagaaagtaaa

SEQ ID NO: 447 - RNA, 23 nt, synthetic construct
  source 1..23: mol_type = other RNA
atggattccatgttcatcagttt

SEQ ID NO: 448 - RNA, 23 nt, synthetic construct
  source 1..23: mol_type = other RNA
gcaatgtgactgctggcaaagat

SEQ ID NO: 449 - RNA, 23 nt, synthetic construct
  source 1..23: mol_type = other RNA
tggtccatgaaaaagcagatgac

SEQ ID NO: 450 - RNA, 21 nt, synthetic construct
  source 1..21: mol_type = other RNA
atgacttgggcaaaggtggaa

SEQ ID NO: 451 - RNA, 21 nt, synthetic construct
  source 1..21: mol_type = other RNA
tgacttgggcaaaggtggaaa

SEQ ID NO: 452 - RNA, 21 nt, synthetic construct
  source 1..21: mol_type = other RNA
gacttgggcaaaggtggaaat

SEQ ID NO: 453 - RNA, 21 nt, synthetic construct
  source 1..21: mol_type = other RNA
aaggtggaaatgaagaaagta

SEQ ID NO: 454 - RNA, 21 nt, synthetic construct
  source 1..21: mol_type = other RNA
aatttcgagcagaaggaaagt

SEQ ID NO: 455 - RNA, 21 nt, synthetic construct
  source 1..21: mol_type = other RNA
gagcagaaggaaagtaatgga

SEQ ID NO: 456 - RNA, 21 nt, synthetic construct
  source 1..21: mol_type = other RNA
agaaggaaagtaatggaccat

SEQ ID NO: 457 - RNA, 21 nt, synthetic construct
  source 1..21: mol_type = other RNA
gaaggaaagtaatggaccagt

SEQ ID NO: 458 - RNA, 21 nt, synthetic construct
  source 1..21: mol_type = other RNA
aggaaagtaatggaccagtga

SEQ ID NO: 459 - RNA, 21 nt, synthetic construct
  source 1..21: mol_type = other RNA
ggaaagtaatggaccagtgaa

SEQ ID NO: 460 - RNA, 21 nt, synthetic construct
  source 1..21: mol_type = other RNA
gaaagtaatggaccagtgaat

SEQ ID NO: 461 - RNA, 21 nt, synthetic construct
  source 1..21: mol_type = other RNA
aaagtaatggaccagtgaagt

SEQ ID NO: 462 - RNA, 21 nt, synthetic construct
  source 1..21: mol_type = other RNA
aagtaatggaccagtgaaggt

SEQ ID NO: 463 - RNA, 21 nt, synthetic construct
  source 1..21: mol_type = other RNA
agtaatggaccagtgaaggtt

SEQ ID NO: 464 - RNA, 21 nt, synthetic construct
  source 1..21: mol_type = other RNA
tgaaggcctgcatggattcca

SEQ ID NO: 465 - RNA, 21 nt, synthetic construct
  source 1..21: mol_type = other RNA
gaaggcctgcatggattccat

SEQ ID NO: 466 - RNA, 21 nt, synthetic construct
  source 1..21: mol_type = other RNA
aggcctgcatggattccatgt

SEQ ID NO: 467 - RNA, 21 nt, synthetic construct
  source 1..21: mol_type = other RNA
ggcctgcatggattccatgtt

SEQ ID NO: 468 - RNA, 21 nt, synthetic construct
  source 1..21: mol_type = other RNA
gcctgcatggattccatgttt

SEQ ID NO: 469 - RNA, 21 nt, synthetic construct
  source 1..21: mol_type = other RNA
cctgcatggattccatgttca

SEQ ID NO: 470 - RNA, 21 nt, synthetic construct
  source 1..21: mol_type = other RNA
ctgcatggattccatgttcat

SEQ ID NO: 471 - RNA, 21 nt, synthetic construct
  source 1..21: mol_type = other RNA
ggtgggccaaaggatgaagat

SEQ ID NO: 472 - RNA, 21 nt, synthetic construct
  source 1..21: mol_type = other RNA
gatgaagagaggcatgttgga

SEQ ID NO: 473 - RNA, 21 nt, synthetic construct
  source 1..21: mol_type = other RNA
caaaggatgaagagaggcatt

SEQ ID NO: 474 - RNA, 21 nt, synthetic construct
  source 1..21: mol_type = other RNA
aaggatgaagagaggcatgtt

SEQ ID NO: 475 - RNA, 21 nt, synthetic construct
  source 1..21: mol_type = other RNA
aggatgaagagaggcatgttt

SEQ ID NO: 476 - RNA, 21 nt, synthetic construct
  source 1..21: mol_type = other RNA
ggatgaagagaggcatgttgt

SEQ ID NO: 477 - RNA, 21 nt, synthetic construct
  source 1..21: mol_type = other RNA
atgaagagaggcatgttggat

SEQ ID NO: 478 - RNA, 21 nt, synthetic construct
  source 1..21: mol_type = other RNA
aagagaggcatgttggagact

SEQ ID NO: 479 - RNA, 21 nt, synthetic construct
  source 1..21: mol_type = other RNA
gatgacttgggcaaaggtgga

SEQ ID NO: 480 - RNA, 21 nt, synthetic construct
  source 1..21: mol_type = other RNA
gtggtccatgaaaaagcagat

SEQ ID NO: 481 - RNA, 21 nt, synthetic construct
  source 1..21: mol_type = other RNA
tggtccatgaaaaagcagatt

SEQ ID NO: 482 - RNA, 21 nt, synthetic construct
  source 1..21: mol_type = other RNA
ggtccatgaaaaagcagatga

SEQ ID NO: 483 - RNA, 21 nt, synthetic construct
  source 1..21: mol_type = other RNA
gcagatgacttgggcaaaggt

SEQ ID NO: 484 - RNA, 21 nt, synthetic construct
  source 1..21: mol_type = other RNA
agatgacttgggcaaaggtgt

SEQ ID NO: 485 - RNA, 21 nt, synthetic construct
  source 1..21: mol_type = other RNA
acttgggcaaaggtggaaatt

SEQ ID NO: 486 - RNA, 21 nt, synthetic construct
  source 1..21: mol_type = other RNA
gcttgtggtgtaattgggatt

SEQ ID NO: 487 - RNA, 21 nt, synthetic construct
  source 1..21: mol_type = other RNA
cttgtggtgtaattgggatct

SEQ ID NO: 488 - RNA, 21 nt, synthetic construct
  source 1..21: mol_type = other RNA
ttgtggtgtaattgggatcgt

SEQ ID NO: 489 - RNA, 21 nt, synthetic construct
  source 1..21: mol_type = other RNA
tgtggtgtaattgggatcgct

SEQ ID NO: 490 - RNA, 21 nt, synthetic construct
  source 1..21: mol_type = other RNA
gtggtgtaattgggatcgcct

SEQ ID NO: 491 - RNA, 21 nt, synthetic construct
  source 1..21: mol_type = other RNA
tgcagggcatcatcaatttct

SEQ ID NO: 492 - RNA, 21 nt, synthetic construct
  source 1..21: mol_type = other RNA
gcagggcatcatcaatttcga

SEQ ID NO: 493 - RNA, 21 nt, synthetic construct
  source 1..21: mol_type = other RNA
cagggcatcatcaatttcgat

SEQ ID NO: 494 - RNA, 21 nt, synthetic construct
  source 1..21: mol_type = other RNA
agggcatcatcaatttcgagt

SEQ ID NO: 495 - RNA, 21 nt, synthetic construct
  source 1..21: mol_type = other RNA
gggcatcatcaatttcgagca

SEQ ID NO: 496 - RNA, 21 nt, synthetic construct
  source 1..21: mol_type = other RNA
ggcatcatcaatttcgagcat

SEQ ID NO: 497 - RNA, 21 nt, synthetic construct
  source 1..21: mol_type = other RNA
catcatcaatttcgagcagaa

SEQ ID NO: 498 - RNA, 21 nt, synthetic construct
  source 1..21: mol_type = other RNA
atcatcaatttcgagcagaat

SEQ ID NO: 499 - RNA, 21 nt, synthetic construct
  source 1..21: mol_type = other RNA
tcatcaatttcgagcagaagt

SEQ ID NO: 500 - RNA, 21 nt, synthetic construct
  source 1..21: mol_type = other RNA
attaaaggactgactgaaggt

SEQ ID NO: 501 - RNA, 21 nt, synthetic construct
  source 1..21: mol_type = other RNA
catgttcatgagtttggagat

SEQ ID NO: 502 - RNA, 21 nt, synthetic construct
  source 1..21: mol_type = other RNA
gttcatgagtttggagataat

SEQ ID NO: 503 - RNA, 21 nt, synthetic construct
  source 1..21: mol_type = other RNA
ttcatgagtttggagataata

SEQ ID NO: 504 - RNA, 21 nt, synthetic construct
  source 1..21: mol_type = other RNA
atgagtttggagataatacat

SEQ ID NO: 505 - RNA, 21 nt, synthetic construct
  source 1..21: mol_type = other RNA
tgtgtctattgaagattctgt

SEQ ID NO: 506 - RNA, 21 nt, synthetic construct
  source 1..21: mol_type = other RNA
gtgtctattgaagattctgtt

SEQ ID NO: 507 - RNA, 21 nt, synthetic construct
  source 1..21: mol_type = other RNA
tggtggtccatgaaaaagcat

SEQ ID NO: 508 - RNA, 21 nt, synthetic construct
  source 1..21: mol_type = other RNA
ggtggtccatgaaaaagcaga

SEQ ID NO: 509 - RNA, 21 nt, synthetic construct
  source 1..21: mol_type = other RNA
gagaccattgcatcattggct

SEQ ID NO: 510 - RNA, 21 nt, synthetic construct
  source 1..21: mol_type = other RNA
actggtggtccatgaaaaagt

SEQ ID NO: 511 - RNA, 21 nt, synthetic construct
  source 1..21: mol_type = other RNA
ctggtggtccatgaaaaagca

SEQ ID NO: 512 - RNA, 21 nt, synthetic construct
  source 1..21: mol_type = other RNA
aggtggaaatgaagaaagtat

SEQ ID NO: 513 - RNA, 21 nt, synthetic construct
  source 1..21: mol_type = other RNA
gaaagtacaaagacaggaaat

SEQ ID NO: 514 - RNA, 21 nt, synthetic construct
  source 1..21: mol_type = other RNA
aaagtacaaagacaggaaact

SEQ ID NO: 515 - RNA, 21 nt, synthetic construct
  source 1..21: mol_type = other RNA
aagtacaaagacaggaaacgt

SEQ ID NO: 516 - RNA, 21 nt, synthetic construct
  source 1..21: mol_type = other RNA
agtacaaagacaggaaacgct

SEQ ID NO: 517 - RNA, 21 nt, synthetic construct
  source 1..21: mol_type = other RNA
gtacaaagacaggaaacgctt

SEQ ID NO: 518 - RNA, 21 nt, synthetic construct
  source 1..21: mol_type = other RNA
tacaaagacaggaaacgctgt

SEQ ID NO: 519 - RNA, 21 nt, synthetic construct
  source 1..21: mol_type = other RNA
caaagacaggaaacgctggaa

SEQ ID NO: 520 - RNA, 21 nt, synthetic construct
  source 1..21: mol_type = other RNA
tggcttgtggtgtaattggga

SEQ ID NO: 521 - RNA, 21 nt, synthetic construct
  source 1..21: mol_type = other RNA
ggcttgtggtgtaattgggat

SEQ ID NO: 522 - RNA, 21 nt, synthetic construct
  source 1..21: mol_type = other RNA
gtcgtttggcttgtggtgtaa

SEQ ID NO: 523 - RNA, 21 nt, synthetic construct
  source 1..21: mol_type = other RNA
tcgtttggcttgtggtgtaat

SEQ ID NO: 524 - RNA, 21 nt, synthetic construct
  source 1..21: mol_type = other RNA
cgtttggcttgtggtgtaatt

SEQ ID NO: 525 - RNA, 21 nt, synthetic construct
  source 1..21: mol_type = other RNA
gtttggcttgtggtgtaattt

SEQ ID NO: 526 - RNA, 21 nt, synthetic construct
  source 1..21: mol_type = other RNA
tttggcttgtggtgtaattgt

SEQ ID NO: 527 - RNA, 21 nt, synthetic construct
  source 1..21: mol_type = other RNA
ttggcttgtggtgtaattggt

SEQ ID NO: 528 - RNA, 21 nt, synthetic construct
  source 1..21: mol_type = other RNA
gtaattgggatcgcccaataa

SEQ ID NO: 529 - RNA, 23 nt, synthetic construct
  source 1..23: mol_type = other RNA
ttccacctttgcccaagtcatct

SEQ ID NO: 530 - RNA, 23 nt, synthetic construct
  source 1..23: mol_type = other RNA
tttccacctttgcccaagtcatc

SEQ ID NO: 531 - RNA, 23 nt, synthetic construct
  source 1..23: mol_type = other RNA
atttccacctttgcccaagtcat

SEQ ID NO: 532 - RNA, 23 nt, synthetic construct
  source 1..23: mol_type = other RNA
tactttcttcatttccacctttg

SEQ ID NO: 533 - RNA, 23 nt, synthetic construct
  source 1..23: mol_type = other RNA
actttccttctgctcgaaattga

SEQ ID NO: 534 - RNA, 23 nt, synthetic construct
  source 1..23: mol_type = other RNA
tccattactttccttctgctcga

SEQ ID NO: 535 - RNA, 23 nt, synthetic construct
  source 1..23: mol_type = other RNA
atggtccattactttccttctgc

SEQ ID NO: 536 - RNA, 23 nt, synthetic construct
  source 1..23: mol_type = other RNA
actggtccattactttccttctg

SEQ ID NO: 537 - RNA, 23 nt, synthetic construct
  source 1..23: mol_type = other RNA
tcactggtccattactttccttc

SEQ ID NO: 538 - RNA, 23 nt, synthetic construct
  source 1..23: mol_type = other RNA
ttcactggtccattactttcctt

SEQ ID NO: 539 - RNA, 23 nt, synthetic construct
  source 1..23: mol_type = other RNA
attcactggtccattactttcct

SEQ ID NO: 540 - RNA, 23 nt, synthetic construct
  source 1..23: mol_type = other RNA
acttcactggtccattactttcc

SEQ ID NO: 541 - RNA, 23 nt, synthetic construct
  source 1..23: mol_type = other RNA
accttcactggtccattactttc

SEQ ID NO: 542 - RNA, 23 nt, synthetic construct
  source 1..23: mol_type = other RNA
aaccttcactggtccattacttt

SEQ ID NO: 543 - RNA, 23 nt, synthetic construct
  source 1..23: mol_type = other RNA
tggaatccatgcaggccttcagt

SEQ ID NO: 544 - RNA, 23 nt, synthetic construct
  source 1..23: mol_type = other RNA
atggaatccatgcaggccttcag

SEQ ID NO: 545 - RNA, 23 nt, synthetic construct
  source 1..23: mol_type = other RNA
acatggaatccatgcaggccttc

SEQ ID NO: 546 - RNA, 23 nt, synthetic construct
  source 1..23: mol_type = other RNA
aacatggaatccatgcaggcctt

SEQ ID NO: 547 - RNA, 23 nt, synthetic construct
  source 1..23: mol_type = other RNA
aaacatggaatccatgcaggcct

SEQ ID NO: 548 - RNA, 23 nt, synthetic construct
  source 1..23: mol_type = other RNA
tgaacatggaatccatgcaggcc

SEQ ID NO: 549 - RNA, 23 nt, synthetic construct
  source 1..23: mol_type = other RNA
atgaacatggaatccatgcaggc

SEQ ID NO: 550 - RNA, 23 nt, synthetic construct
  source 1..23: mol_type = other RNA
atcttcatcctttggcccaccgt

SEQ ID NO: 551 - RNA, 23 nt, synthetic construct
  source 1..23: mol_type = other RNA
tccaacatgcctctcttcatcct

SEQ ID NO: 552 - RNA, 23 nt, synthetic construct
  source 1..23: mol_type = other RNA
aatgcctctcttcatcctttggc

SEQ ID NO: 553 - RNA, 23 nt, synthetic construct
  source 1..23: mol_type = other RNA
aacatgcctctcttcatcctttg

SEQ ID NO: 554 - RNA, 23 nt, synthetic construct
  source 1..23: mol_type = other RNA
aaacatgcctctcttcatccttt

SEQ ID NO: 555 - RNA, 23 nt, synthetic construct
  source 1..23: mol_type = other RNA
acaacatgcctctcttcatcctt

SEQ ID NO: 556 - RNA, 23 nt, synthetic construct
  source 1..23: mol_type = other RNA
atccaacatgcctctcttcatcc

SEQ ID NO: 557 - RNA, 23 nt, synthetic construct
  source 1..23: mol_type = other RNA
agtctccaacatgcctctcttca

SEQ ID NO: 558 - RNA, 23 nt, synthetic construct
  source 1..23: mol_type = other RNA
tccacctttgcccaagtcatctg

SEQ ID NO: 559 - RNA, 23 nt, synthetic construct
  source 1..23: mol_type = other RNA
atctgctttttcatggaccacca

SEQ ID NO: 560 - RNA, 23 nt, synthetic construct
  source 1..23: mol_type = other RNA
aatctgctttttcatggaccacc

SEQ ID NO: 561 - RNA, 23 nt, synthetic construct
  source 1..23: mol_type = other RNA
tcatctgctttttcatggaccac

SEQ ID NO: 562 - RNA, 23 nt, synthetic construct
  source 1..23: mol_type = other RNA
acctttgcccaagtcatctgctt

SEQ ID NO: 563 - RNA, 23 nt, synthetic construct
  source 1..23: mol_type = other RNA
acacctttgcccaagtcatctgc

SEQ ID NO: 564 - RNA, 23 nt, synthetic construct
  source 1..23: mol_type = other RNA
aatttccacctttgcccaagtca

SEQ ID NO: 565 - RNA, 23 nt, synthetic construct
  source 1..23: mol_type = other RNA
aatcccaattacaccacaagcca

SEQ ID NO: 566 - RNA, 23 nt, synthetic construct
  source 1..23: mol_type = other RNA
agatcccaattacaccacaagcc

SEQ ID NO: 567 - RNA, 23 nt, synthetic construct
  source 1..23: mol_type = other RNA
acgatcccaattacaccacaagc

SEQ ID NO: 568 - RNA, 23 nt, synthetic construct
  source 1..23: mol_type = other RNA
agcgatcccaattacaccacaag

SEQ ID NO: 569 - RNA, 23 nt, synthetic construct
  source 1..23: mol_type = other RNA
aggcgatcccaattacaccacaa

SEQ ID NO: 570 - RNA, 23 nt, synthetic construct
  source 1..23: mol_type = other RNA
agaaattgatgatgccctgcact

SEQ ID NO: 571 - RNA, 23 nt, synthetic construct
  source 1..23: mol_type = other RNA
tcgaaattgatgatgccctgcac

SEQ ID NO: 572 - RNA, 23 nt, synthetic construct
  source 1..23: mol_type = other RNA
atcgaaattgatgatgccctgca

SEQ ID NO: 573 - RNA, 23 nt, synthetic construct
  source 1..23: mol_type = other RNA
actcgaaattgatgatgccctgc

SEQ ID NO: 574 - RNA, 23 nt, synthetic construct
  source 1..23: mol_type = other RNA
tgctcgaaattgatgatgccctg

SEQ ID NO: 575 - RNA, 23 nt, synthetic construct
  source 1..23: mol_type = other RNA
atgctcgaaattgatgatgccct

SEQ ID NO: 576 - RNA, 23 nt, synthetic construct
  source 1..23: mol_type = other RNA
ttctgctcgaaattgatgatgcc

SEQ ID NO: 577 - RNA, 23 nt, synthetic construct
  source 1..23: mol_type = other RNA
attctgctcgaaattgatgatgc

SEQ ID NO: 578 - RNA, 23 nt, synthetic construct
  source 1..23: mol_type = other RNA
acttctgctcgaaattgatgatg

SEQ ID NO: 579 - RNA, 23 nt, synthetic construct
  source 1..23: mol_type = other RNA
accttcagtcagtcctttaatgc

SEQ ID NO: 580 - RNA, 23 nt, synthetic construct
  source 1..23: mol_type = other RNA
atctccaaactcatgaacatgga

SEQ ID NO: 581 - RNA, 23 nt, synthetic construct
  source 1..23: mol_type = other RNA
attatctccaaactcatgaacat

SEQ ID NO: 582 - RNA, 23 nt, synthetic construct
  source 1..23: mol_type = other RNA
tattatctccaaactcatgaaca

SEQ ID NO: 583 - RNA, 23 nt, synthetic construct
  source 1..23: mol_type = other RNA
atgtattatctccaaactcatga

SEQ ID NO: 584 - RNA, 23 nt, synthetic construct
  source 1..23: mol_type = other RNA
acagaatcttcaatagacacatc

SEQ ID NO: 585 - RNA, 23 nt, synthetic construct
  source 1..23: mol_type = other RNA
aacagaatcttcaatagacacat

SEQ ID NO: 586 - RNA, 23 nt, synthetic construct
  source 1..23: mol_type = other RNA
atgctttttcatggaccaccagt

SEQ ID NO: 587 - RNA, 23 nt, synthetic construct
  source 1..23: mol_type = other RNA
tctgctttttcatggaccaccag

SEQ ID NO: 588 - RNA, 23 nt, synthetic construct
  source 1..23: mol_type = other RNA
agccaatgatgcaatggtctcct

SEQ ID NO: 589 - RNA, 23 nt, synthetic construct
  source 1..23: mol_type = other RNA
actttttcatggaccaccagtgt

SEQ ID NO: 590 - RNA, 23 nt, synthetic construct
  source 1..23: mol_type = other RNA
tgctttttcatggaccaccagtg

SEQ ID NO: 591 - RNA, 23 nt, synthetic construct
  source 1..23: mol_type = other RNA
atactttcttcatttccaccttt

SEQ ID NO: 592 - RNA, 23 nt, synthetic construct
  source 1..23: mol_type = other RNA
atttcctgtctttgtactttctt

SEQ ID NO: 593 - RNA, 23 nt, synthetic construct
  source 1..23: mol_type = other RNA
agtttcctgtctttgtactttct

SEQ ID NO: 594 - RNA, 23 nt, synthetic construct
  source 1..23: mol_type = other RNA
acgtttcctgtctttgtactttc

SEQ ID NO: 595 - RNA, 23 nt, synthetic construct
  source 1..23: mol_type = other RNA
agcgtttcctgtctttgtacttt

SEQ ID NO: 596 - RNA, 23 nt, synthetic construct
  source 1..23: mol_type = other RNA
aagcgtttcctgtctttgtactt

SEQ ID NO: 597 - RNA, 23 nt, synthetic construct
  source 1..23: mol_type = other RNA
acagcgtttcctgtctttgtact

SEQ ID NO: 598 - RNA, 23 nt, synthetic construct
  source 1..23: mol_type = other RNA
ttccagcgtttcctgtctttgta

SEQ ID NO: 599 - RNA, 23 nt, synthetic construct
  source 1..23: mol_type = other RNA
tcccaattacaccacaagccaaa

SEQ ID NO: 600 - RNA, 23 nt, synthetic construct
  source 1..23: mol_type = other RNA
atcccaattacaccacaagccaa

SEQ ID NO: 601 - RNA, 23 nt, synthetic construct
  source 1..23: mol_type = other RNA
ttacaccacaagccaaacgactt

SEQ ID NO: 602 - RNA, 23 nt, synthetic construct
  source 1..23: mol_type = other RNA
attacaccacaagccaaacgact

SEQ ID NO: 603 - RNA, 23 nt, synthetic construct
  source 1..23: mol_type = other RNA
aattacaccacaagccaaacgac

SEQ ID NO: 604 - RNA, 23 nt, synthetic construct
  source 1..23: mol_type = other RNA
aaattacaccacaagccaaacga

SEQ ID NO: 605 - RNA, 23 nt, synthetic construct
  source 1..23: mol_type = other RNA
acaattacaccacaagccaaacg

SEQ ID NO: 606 - RNA, 23 nt, synthetic construct
  source 1..23: mol_type = other RNA
accaattacaccacaagccaaac

SEQ ID NO: 607 - RNA, 23 nt, synthetic construct
  source 1..23: mol_type = other RNA
ttattgggcgatcccaattacac

SEQ ID NO: 608 - RNA, 21 nt, synthetic construct
  source 1..21: mol_type = other RNA
  modified_base 1: mod_base = OTHER; note = 2'-O-methyladenosine-3'-phosphorothioate
  modified_base 2: mod_base = OTHER; note = 2'-O-methyluridine-3'-phosphorothioate
  modified_base 3: mod_base = OTHER; note = 2'-O-methylguanosine-3'-phosphate
  modified_base 4: mod_base = OTHER; note = 2'-O-methyladenosine-3'-phosphate
  modified_base 5: mod_base = OTHER; note = 2'-O-methylcytidine-3'-phosphate
  modified_base 6: mod_base = OTHER; note = 2'-O-methyluridine-3'-phosphate
  modified_base 7: mod_base = OTHER; note = 2'-deoxy-2'-fluorouridine-3'-phosphate
  modified_base 8: mod_base = OTHER; note = 2'-O-methylguanosine-3'-phosphate
  modified_base 9: mod_base = OTHER; note = 2'-deoxy-2'-fluoroguanosine-3'-phosphate
  modified_base 10: mod_base = OTHER; note = 2'-deoxy-2'-fluoroguanosine-3'-phosphate
  modified_base 11: mod_base = OTHER; note = 2'-deoxy-2'-fluorocytidine-3'-phosphate
  modified_base 12: mod_base = OTHER; note = 2'-O-methyladenosine-3'-phosphate
  modified_base 13: mod_base = OTHER; note = 2'-O-methyladenosine-3'-phosphate
  modified_base 14: mod_base = OTHER; note = 2'-O-methyladenosine-3'-phosphate
  modified_base 15: mod_base = OTHER; note = 2'-O-methylguanosine-3'-phosphate
  modified_base 16: mod_base = OTHER; note = 2'-O-methylguanosine-3'-phosphate
  modified_base 17: mod_base = OTHER; note = 2'-O-methyluridine-3'-phosphate
  modified_base 18: mod_base = OTHER; note = 2'-O-methylguanosine-3'-phosphate
  modified_base 19: mod_base = OTHER; note = 2'-O-methylguanosine-3'-phosphate
  modified_base 20: mod_base = OTHER; note = 2'-O-methyladenosine-3'-phosphate
  modified_base 21: mod_base = OTHER; note = 2'-O-methyladenosine-3'-phosphate ((2S,4R)-1-[29-[[2-(acetylamino)-2-deoxy-beta-D-galactopyra nosyl]oxy]-14,14-bis[[3-[[3-[[5-[[2-(acetylamino)-2-deoxy-b eta-D-galactopyranosyl]oxy]-1-oxopentyl]amino]propyl]amino] -3-oxopropoxy]methyl]-1,12,19,25-tetraoxo-16-oxa-13,20,24-t riazanonacos-1-yl]-4-hydroxy-2-pyrrolidinyl)methyl ester
atgacttgggcaaaggtggaa

SEQ ID NO: 609 - RNA, 21 nt, synthetic construct
  source 1..21: mol_type = other RNA
  modified_base 1: mod_base = OTHER; note = 2'-O-methyluridine-3'-phosphorothioate
  modified_base 2: mod_base = OTHER; note = 2'-O-methylguanosine-3'-phosphorothioate
  modified_base 3: mod_base = OTHER; note = 2'-O-methyladenosine-3'-phosphate
  modified_base 4: mod_base = OTHER; note = 2'-O-methylcytidine-3'-phosphate
  modified_base 5: mod_base = OTHER; note = 2'-O-methyluridine-3'-phosphate
  modified_base 6: mod_base = OTHER; note = 2'-O-methyluridine-3'-phosphate
  modified_base 7: mod_base = OTHER; note = 2'-deoxy-2'-fluoroguanosine-3'-phosphate
  modified_base 8: mod_base = OTHER; note = 2'-O-methylguanosine-3'-phosphate
  modified_base 9: mod_base = OTHER; note = 2'-deoxy-2'-fluoroguanosine-3'-phosphate
  modified_base 10: mod_base = OTHER; note = 2'-deoxy-2'-fluorocytidine-3'-phosphate
  modified_base 11: mod_base = OTHER; note = 2'-deoxy-2'-fluoroadenosine-3'-phosphate
  modified_base 12: mod_base = OTHER; note = 2'-O-methyladenosine-3'-phosphate
  modified_base 13: mod_base = OTHER; note = 2'-O-methyladenosine-3'-phosphate
  modified_base 14: mod_base = OTHER; note = 2'-O-methylguanosine-3'-phosphate
  modified_base 15: mod_base = OTHER; note = 2'-O-methylguanosine-3'-phosphate
  modified_base 16: mod_base = OTHER; note = 2'-O-methyluridine-3'-phosphate
  modified_base 17: mod_base = OTHER; note = 2'-O-methylguanosine-3'-phosphate
  modified_base 18: mod_base = OTHER; note = 2'-O-methylguanosine-3'-phosphate
  modified_base 19: mod_base = OTHER; note = 2'-O-methyladenosine-3'-phosphate
  modified_base 20: mod_base = OTHER; note = 2'-O-methyladenosine-3'-phosphate
  modified_base 21: mod_base = OTHER; note = 2'-O-methyladenosine-3'-phosphate ((2S,4R)-1-[29-[[2-(acetylamino)-2-deoxy-beta-D-galactopyra nosyl]oxy]-14,14-bis[[3-[[3-[[5-[[2-(acetylamino)-2-deoxy-b eta-D-galactopyranosyl]oxy]-1-oxopentyl]amino]propyl]amino] -3-oxopropoxy]methyl]-1,12,19,25-tetraoxo-16-oxa-13,20,24-t riazanonacos-1-yl]-4-hydroxy-2-pyrrolidinyl)methyl ester
tgacttgggcaaaggtggaaa

SEQ ID NO: 610 - RNA, 21 nt, synthetic construct
  source 1..21: mol_type = other RNA
  modified_base 1: mod_base = OTHER; note = 2'-O-methylguanosine-3'-phosphorothioate
  modified_base 2: mod_base = OTHER; note = 2'-O-methyladenosine-3'-phosphorothioate
  modified_base 3: mod_base = OTHER; note = 2'-O-methylcytidine-3'-phosphate
  modified_base 4: mod_base = OTHER; note = 2'-O-methyluridine-3'-phosphate
  modified_base 5: mod_base = OTHER; note = 2'-O-methyluridine-3'-phosphate
  modified_base 6: mod_base = OTHER; note = 2'-O-methylguanosine-3'-phosphate
  modified_base 7: mod_base = OTHER; note = 2'-deoxy-2'-fluoroguanosine-3'-phosphate
  modified_base 8: mod_base = OTHER; note = 2'-O-methylguanosine-3'-phosphate
  modified_base 9: mod_base = OTHER; note = 2'-deoxy-2'-fluorocytidine-3'-phosphate
  modified_base 10: mod_base = OTHER; note = 2'-deoxy-2'-fluoroadenosine-3'-phosphate
  modified_base 11: mod_base = OTHER; note = 2'-deoxy-2'-fluoroadenosine-3'-phosphate
  modified_base 12: mod_base = OTHER; note = 2'-O-methyladenosine-3'-phosphate
  modified_base 13: mod_base = OTHER; note = 2'-O-methylguanosine-3'-phosphate
  modified_base 14: mod_base = OTHER; note = 2'-O-methylguanosine-3'-phosphate
  modified_base 15: mod_base = OTHER; note = 2'-O-methyluridine-3'-phosphate
  modified_base 16: mod_base = OTHER; note = 2'-O-methylguanosine-3'-phosphate
  modified_base 17: mod_base = OTHER; note = 2'-O-methylguanosine-3'-phosphate
  modified_base 18: mod_base = OTHER; note = 2'-O-methyladenosine-3'-phosphate
  modified_base 19: mod_base = OTHER; note = 2'-O-methyladenosine-3'-phosphate
  modified_base 20: mod_base = OTHER; note = 2'-O-methyladenosine-3'-phosphate
  modified_base 21: mod_base = OTHER; note = 2'-O-methyluridine-3'-phosphate ((2S,4R)-1-[29-[[2-(acetylamino)-2-deoxy-beta-D-galactopyra nosyl]oxy]-14,14-bis[[3-[[3-[[5-[[2-(acetylamino)-2-deoxy-b eta-D-galactopyranosyl]oxy]-1-oxopentyl]amino]propyl]amino] -3-oxopropoxy]methyl]-1,12,19,25-tetraoxo-16-oxa-13,20,24-t riazanonacos-1-yl]-4-hydroxy-2-pyrrolidinyl)methyl ester
gacttgggcaaaggtggaaat

SEQ ID NO: 611 - RNA, 21 nt, synthetic construct
  source 1..21: mol_type = other RNA
  modified_base 1: mod_base = OTHER; note = 2'-O-methyladenosine-3'-phosphorothioate
  modified_base 2: mod_base = OTHER; note = 2'-O-methyladenosine-3'-phosphorothioate
  modified_base 3: mod_base = OTHER; note = 2'-O-methylguanosine-3'-phosphate
  modified_base 4: mod_base = OTHER; note = 2'-O-methylguanosine-3'-phosphate
  modified_base 5: mod_base = OTHER; note = 2'-O-methyluridine-3'-phosphate
  modified_base 6: mod_base = OTHER; note = 2'-O-methylguanosine-3'-phosphate
  modified_base 7: mod_base = OTHER; note = 2'-deoxy-2'-fluoroguanosine-3'-phosphate
  modified_base 8: mod_base = OTHER; note = 2'-O-methyladenosine-3'-phosphate
  modified_base 9: mod_base = OTHER; note = 2'-deoxy-2'-fluoroadenosine-3'-phosphate
  modified_base 10: mod_base = OTHER; note = 2'-deoxy-2'-fluoroadenosine-3'-phosphate
  modified_base 11: mod_base = OTHER; note = 2'-deoxy-2'-fluorouridine-3'-phosphate
  modified_base 12: mod_base = OTHER; note = 2'-O-methylguanosine-3'-phosphate
  modified_base 13: mod_base = OTHER; note = 2'-O-methyladenosine-3'-phosphate
  modified_base 14: mod_base = OTHER; note = 2'-O-methyladenosine-3'-phosphate
  modified_base 15: mod_base = OTHER; note = 2'-O-methylguanosine-3'-phosphate
  modified_base 16: mod_base = OTHER; note = 2'-O-methyladenosine-3'-phosphate
  modified_base 17: mod_base = OTHER; note = 2'-O-methyladenosine-3'-phosphate
  modified_base 18: mod_base = OTHER; note = 2'-O-methyladenosine-3'-phosphate
  modified_base 19: mod_base = OTHER; note = 2'-O-methylguanosine-3'-phosphate
  modified_base 20: mod_base = OTHER; note = 2'-O-methyluridine-3'-phosphate
  modified_base 21: mod_base = OTHER; note = 2'-O-methyladenosine-3'-phosphate ((2S,4R)-1-[29-[[2-(acetylamino)-2-deoxy-beta-D-galactopyra nosyl]oxy]-14,14-bis[[3-[[3-[[5-[[2-(acetylamino)-2-deoxy-b eta-D-galactopyranosyl]oxy]-1-oxopentyl]amino]propyl]amino] -3-oxopropoxy]methyl]-1,12,19,25-tetraoxo-16-oxa-13,20,24-t riazanonacos-1-yl]-4-hydroxy-2-pyrrolidinyl)methyl ester
aaggtggaaatgaagaaagta

SEQ ID NO: 612 - RNA, 21 nt, synthetic construct
  source 1..21: mol_type = other RNA
  modified_base 1: mod_base = OTHER; note = 2'-O-methyladenosine-3'-phosphorothioate
  modified_base 2: mod_base = OTHER; note = 2'-O-methyladenosine-3'-phosphorothioate
  modified_base 3: mod_base = OTHER; note = 2'-O-methyluridine-3'-phosphate
  modified_base 4: mod_base = OTHER; note = 2'-O-methyluridine-3'-phosphate
  modified_base 5: mod_base = OTHER; note = 2'-O-methyluridine-3'-phosphate
  modified_base 6: mod_base = OTHER; note = 2'-O-methylcytidine-3'-phosphate
  modified_base 7: mod_base = OTHER; note = 2'-deoxy-2'-fluoroguanosine-3'-phosphate
  modified_base 8: mod_base = OTHER; note = 2'-O-methyladenosine-3'-phosphate
  modified_base 9: mod_base = OTHER; note = 2'-deoxy-2'-fluoroguanosine-3'-phosphate
  modified_base 10: mod_base = OTHER; note = 2'-deoxy-2'-fluorocytidine-3'-phosphate
  modified_base 11: mod_base = OTHER; note = 2'-deoxy-2'-fluoroadenosine-3'-phosphate
  modified_base 12: mod_base = OTHER; note = 2'-O-methylguanosine-3'-phosphate
  modified_base 13: mod_base = OTHER; note = 2'-O-methyladenosine-3'-phosphate
  modified_base 14: mod_base = OTHER; note = 2'-O-methyladenosine-3'-phosphate
  modified_base 15: mod_base = OTHER; note = 2'-O-methylguanosine-3'-phosphate
  modified_base 16: mod_base = OTHER; note = 2'-O-methylguanosine-3'-phosphate
  modified_base 17: mod_base = OTHER; note = 2'-O-methyladenosine-3'-phosphate
  modified_base 18: mod_base = OTHER; note = 2'-O-methyladenosine-3'-phosphate
  modified_base 19: mod_base = OTHER; note = 2'-O-methyladenosine-3'-phosphate
  modified_base 20: mod_base = OTHER; note = 2'-O-methylguanosine-3'-phosphate
  modified_base 21: mod_base = OTHER; note = 2'-O-methyluridine-3'-phosphate ((2S,4R)-1-[29-[[2-(acetylamino)-2-deoxy-beta-D-galactopyra nosyl]oxy]-14,14-bis[[3-[[3-[[5-[[2-(acetylamino)-2-deoxy-b eta-D-galactopyranosyl]oxy]-1-oxopentyl]amino]propyl]amino] -3-oxopropoxy]methyl]-1,12,19,25-tetraoxo-16-oxa-13,20,24-t riazanonacos-1-yl]-4-hydroxy-2-pyrrolidinyl)methyl ester
aatttcgagcagaaggaaagt

SEQ ID NO: 613 - RNA, 21 nt, synthetic construct
  source 1..21: mol_type = other RNA
  modified_base 1: mod_base = OTHER; note = 2'-O-methylguanosine-3'-phosphorothioate
  modified_base 2: mod_base = OTHER; note = 2'-O-methyladenosine-3'-phosphorothioate
  modified_base 3: mod_base = OTHER; note = 2'-O-methylguanosine-3'-phosphate
  modified_base 4: mod_base = OTHER; note = 2'-O-methylcytidine-3'-phosphate
  modified_base 5: mod_base = OTHER; note = 2'-O-methyladenosine-3'-phosphate
  modified_base 6: mod_base = OTHER; note = 2'-O-methylguanosine-3'-phosphate
  modified_base 7: mod_base = OTHER; note = 2'-deoxy-2'-fluoroadenosine-3'-phosphate
  modified_base 8: mod_base = OTHER; note = 2'-O-methyladenosine-3'-phosphate
  modified_base 9: mod_base = OTHER; note = 2'-deoxy-2'-fluoroguanosine-3'-phosphate
  modified_base 10: mod_base = OTHER; note = 2'-deoxy-2'-fluoroguanosine-3'-phosphate
  modified_base 11: mod_base = OTHER; note = 2'-deoxy-2'-fluoroadenosine-3'-phosphate
  modified_base 12: mod_base = OTHER; note = 2'-O-methyladenosine-3'-phosphate
  modified_base 13: mod_base = OTHER; note = 2'-O-methyladenosine-3'-phosphate
  modified_base 14: mod_base = OTHER; note = 2'-O-methylguanosine-3'-phosphate
  modified_base 15: mod_base = OTHER; note = 2'-O-methyluridine-3'-phosphate
  modified_base 16: mod_base = OTHER; note = 2'-O-methyladenosine-3'-phosphate
  modified_base 17: mod_base = OTHER; note = 2'-O-methyladenosine-3'-phosphate
  modified_base 18: mod_base = OTHER; note = 2'-O-methyluridine-3'-phosphate
  modified_base 19: mod_base = OTHER; note = 2'-O-methylguanosine-3'-phosphate
  modified_base 20: mod_base = OTHER; note = 2'-O-methylguanosine-3'-phosphate
  modified_base 21: mod_base = OTHER; note = 2'-O-methyladenosine-3'-phosphate ((2S,4R)-1-[29-[[2-(acetylamino)-2-deoxy-beta-D-galactopyra nosyl]oxy]-14,14-bis[[3-[[3-[[5-[[2-(acetylamino)-2-deoxy-b eta-D-galactopyranosyl]oxy]-1-oxopentyl]amino]propyl]amino] -3-oxopropoxy]methyl]-1,12,19,25-tetraoxo-16-oxa-13,20,24-t riazanonacos-1-yl]-4-hydroxy-2-pyrrolidinyl)methyl ester
gagcagaaggaaagtaatgga

SEQ ID NO: 614 - RNA, 21 nt, synthetic construct
  source 1..21: mol_type = other RNA
  modified_base 1: mod_base = OTHER; note = 2'-O-methyladenosine-3'-phosphorothioate
  modified_base 2: mod_base = OTHER; note = 2'-O-methylguanosine-3'-phosphorothioate
  modified_base 3: mod_base = OTHER; note = 2'-O-methyladenosine-3'-phosphate
  modified_base 4: mod_base = OTHER; note = 2'-O-methyladenosine-3'-phosphate
  modified_base 5: mod_base = OTHER; note = 2'-O-methylguanosine-3'-phosphate
  modified_base 6: mod_base = OTHER; note = 2'-O-methylguanosine-3'-phosphate
  modified_base 7: mod_base = OTHER; note = 2'-deoxy-2'-fluoroadenosine-3'-phosphate
  modified_base 8: mod_base = OTHER; note = 2'-O-methyladenosine-3'-phosphate
  modified_base 9: mod_base = OTHER; note = 2'-deoxy-2'-fluoroadenosine-3'-phosphate
  modified_base 10: mod_base = OTHER; note = 2'-deoxy-2'-fluoroguanosine-3'-phosphate
  modified_base 11: mod_base = OTHER; note = 2'-deoxy-2'-fluorouridine-3'-phosphate
  modified_base 12: mod_base = OTHER; note = 2'-O-methyladenosine-3'-phosphate
  modified_base 13: mod_base = OTHER; note = 2'-O-methyladenosine-3'-phosphate
  modified_base 14: mod_base = OTHER; note = 2'-O-methyluridine-3'-phosphate
  modified_base 15: mod_base = OTHER; note = 2'-O-methylguanosine-3'-phosphate
  modified_base 16: mod_base = OTHER; note = 2'-O-methylguanosine-3'-phosphate
  modified_base 17: mod_base = OTHER; note = 2'-O-methyladenosine-3'-phosphate
  modified_base 18: mod_base = OTHER; note = 2'-O-methylcytidine-3'-phosphate
  modified_base 19: mod_base = OTHER; note = 2'-O-methylcytidine-3'-phosphate
  modified_base 20: mod_base = OTHER; note = 2'-O-methyladenosine-3'-phosphate
  modified_base 21: mod_base = OTHER; note = 2'-O-methyluridine-3'-phosphate ((2S,4R)-1-[29-[[2-(acetylamino)-2-deoxy-beta-D-galactopyra nosyl]oxy]-14,14-bis[[3-[[3-[[5-[[2-(acetylamino)-2-deoxy-b eta-D-galactopyranosyl]oxy]-1-oxopentyl]amino]propyl]amino] -3-oxopropoxy]methyl]-1,12,19,25-tetraoxo-16-oxa-13,20,24-t riazanonacos-1-yl]-4-hydroxy-2-pyrrolidinyl)methyl ester
agaaggaaagtaatggaccat

SEQ ID NO: 615 - RNA, 21 nt, synthetic construct
  source 1..21: mol_type = other RNA
  modified_base 1: mod_base = OTHER; note = 2'-O-methylguanosine-3'-phosphorothioate
  modified_base 2: mod_base = OTHER; note = 2'-O-methyladenosine-3'-phosphorothioate
  modified_base 3: mod_base = OTHER; note = 2'-O-methyladenosine-3'-phosphate
  modified_base 4: mod_base = OTHER; note = 2'-O-methylguanosine-3'-phosphate
  modified_base 5: mod_base = OTHER; note = 2'-O-methylguanosine-3'-phosphate
  modified_base 6: mod_base = OTHER; note = 2'-O-methyladenosine-3'-phosphate
  modified_base 7: mod_base = OTHER; note = 2'-deoxy-2'-fluoroadenosine-3'-phosphate
  modified_base 8: mod_base = OTHER; note = 2'-O-methyladenosine-3'-phosphate
  modified_base 9: mod_base = OTHER; note = 2'-deoxy-2'-fluoroguanosine-3'-phosphate
  modified_base 10: mod_base = OTHER; note = 2'-deoxy-2'-fluorouridine-3'-phosphate
  modified_base 11: mod_base = OTHER; note = 2'-deoxy-2'-fluoroadenosine-3'-phosphate
  modified_base 12: mod_base = OTHER; note = 2'-O-methyladenosine-3'-phosphate
  modified_base 13: mod_base = OTHER; note = 2'-O-methyluridine-3'-phosphate
  modified_base 14: mod_base = OTHER; note = 2'-O-methylguanosine-3'-phosphate
  modified_base 15: mod_base = OTHER; note = 2'-O-methylguanosine-3'-phosphate
  modified_base 16: mod_base = OTHER; note = 2'-O-methyladenosine-3'-phosphate
  modified_base 17: mod_base = OTHER; note = 2'-O-methylcytidine-3'-phosphate
  modified_base 18: mod_base = OTHER; note = 2'-O-methylcytidine-3'-phosphate
  modified_base 19: mod_base = OTHER; note = 2'-O-methyladenosine-3'-phosphate
  modified_base 20: mod_base = OTHER; note = 2'-O-methylguanosine-3'-phosphate
  modified_base 21: mod_base = OTHER; note = 2'-O-methyluridine-3'-phosphate ((2S,4R)-1-[29-[[2-(acetylamino)-2-deoxy-beta-D-galactopyra nosyl]oxy]-14,14-bis[[3-[[3-[[5-[[2-(acetylamino)-2-deoxy-b eta-D-galactopyranosyl]oxy]-1-oxopentyl]amino]propyl]amino] -3-oxopropoxy]methyl]-1,12,19,25-tetraoxo-16-oxa-13,20,24-t riazanonacos-1-yl]-4-hydroxy-2-pyrrolidinyl)methyl ester
gaaggaaagtaatggaccagt

SEQ ID NO: 616 - RNA, 21 nt, synthetic construct
  source 1..21: mol_type = other RNA
  modified_base 1: mod_base = OTHER; note = 2'-O-methyladenosine-3'-phosphorothioate
  modified_base 2: mod_base = OTHER; note = 2'-O-methylguanosine-3'-phosphorothioate
  modified_base 3: mod_base = OTHER; note = 2'-O-methylguanosine-3'-phosphate
  modified_base 4: mod_base = OTHER; note = 2'-O-methyladenosine-3'-phosphate
  modified_base 5: mod_base = OTHER; note = 2'-O-methyladenosine-3'-phosphate
  modified_base 6: mod_base = OTHER; note = 2'-O-methyladenosine-3'-phosphate
  modified_base 7: mod_base = OTHER; note = 2'-deoxy-2'-fluoroguanosine-3'-phosphate
  modified_base 8: mod_base = OTHER; note = 2'-O-methyluridine-3'-phosphate
  modified_base 9: mod_base = OTHER; note = 2'-deoxy-2'-fluoroadenosine-3'-phosphate
  modified_base 10: mod_base = OTHER; note = 2'-deoxy-2'-fluoroadenosine-3'-phosphate
  modified_base 11: mod_base = OTHER; note = 2'-deoxy-2'-fluorouridine-3'-phosphate
  modified_base 12: mod_base = OTHER; note = 2'-O-methylguanosine-3'-phosphate
  modified_base 13: mod_base = OTHER; note = 2'-O-methylguanosine-3'-phosphate
  modified_base 14: mod_base = OTHER; note = 2'-O-methyladenosine-3'-phosphate
  modified_base 15: mod_base = OTHER; note = 2'-O-methylcytidine-3'-phosphate
  modified_base 16: mod_base = OTHER; note = 2'-O-methylcytidine-3'-phosphate
  modified_base 17: mod_base = OTHER; note = 2'-O-methyladenosine-3'-phosphate
  modified_base 18: mod_base = OTHER; note = 2'-O-methylguanosine-3'-phosphate
  modified_base 19: mod_base = OTHER; note = 2'-O-methyluridine-3'-phosphate
  modified_base 20: mod_base = OTHER; note = 2'-O-methylguanosine-3'-phosphate
  modified_base 21: mod_base = OTHER; note = 2'-O-methyladenosine-3'-phosphate ((2S,4R)-1-[29-[[2-(acetylamino)-2-deoxy-beta-D-galactopyra nosyl]oxy]-14,14-bis[[3-[[3-[[5-[[2-(acetylamino)-2-deoxy-b eta-D-galactopyranosyl]oxy]-1-oxopentyl]amino]propyl]amino] -3-oxopropoxy]methyl]-1,12,19,25-tetraoxo-16-oxa-13,20,24-t riazanonacos-1-yl]-4-hydroxy-2-pyrrolidinyl)methyl ester
aggaaagtaatggaccagtga

SEQ ID NO: 617 - RNA, 21 nt, synthetic construct
  source 1..21: mol_type = other RNA
  modified_base 1: mod_base = OTHER; note = 2'-O-methylguanosine-3'-phosphorothioate
  modified_base 2: mod_base = OTHER; note = 2'-O-methylguanosine-3'-phosphorothioate
  modified_base 3: mod_base = OTHER; note = 2'-O-methyladenosine-3'-phosphate
  modified_base 4: mod_base = OTHER; note = 2'-O-methyladenosine-3'-phosphate
  modified_base 5: mod_base = OTHER; note = 2'-O-methyladenosine-3'-phosphate
  modified_base 6: mod_base = OTHER; note = 2'-O-methylguanosine-3'-phosphate
  modified_base 7: mod_base = OTHER; note = 2'-deoxy-2'-fluorouridine-3'-phosphate
  modified_base 8: mod_base = OTHER; note = 2'-O-methyladenosine-3'-phosphate
  modified_base 9: mod_base = OTHER; note = 2'-deoxy-2'-fluoroadenosine-3'-phosphate
  modified_base 10: mod_base = OTHER; note = 2'-deoxy-2'-fluorouridine-3'-phosphate
  modified_base 11: mod_base = OTHER; note = 2'-deoxy-2'-fluoroguanosine-3'-phosphate
  modified_base 12: mod_base = OTHER; note = 2'-O-methylguanosine-3'-phosphate
  modified_base 13: mod_base = OTHER; note = 2'-O-methyladenosine-3'-phosphate
  modified_base 14: mod_base = OTHER; note = 2'-O-methylcytidine-3'-phosphate
  modified_base 15: mod_base = OTHER; note = 2'-O-methylcytidine-3'-phosphate
  modified_base 16: mod_base = OTHER; note = 2'-O-methyladenosine-3'-phosphate
  modified_base 17: mod_base = OTHER; note = 2'-O-methylguanosine-3'-phosphate
  modified_base 18: mod_base = OTHER; note = 2'-O-methyluridine-3'-phosphate
  modified_base 19: mod_base = OTHER; note = 2'-O-methylguanosine-3'-phosphate
  modified_base 20: mod_base = OTHER; note = 2'-O-methyladenosine-3'-phosphate
  modified_base 21: mod_base = OTHER; note = 2'-O-methyladenosine-3'-phosphate ((2S,4R)-1-[29-[[2-(acetylamino)-2-deoxy-beta-D-galactopyra nosyl]oxy]-14,14-bis[[3-[[3-[[5-[[2-(acetylamino)-2-deoxy-b eta-D-galactopyranosyl]oxy]-1-oxopentyl]amino]propyl]amino] -3-oxopropoxy]methyl]-1,12,19,25-tetraoxo-16-oxa-13,20,24-t riazanonacos-1-yl]-4-hydroxy-2-pyrrolidinyl)methyl ester
ggaaagtaatggaccagtgaa

SEQ ID NO: 618 - RNA, 21 nt, synthetic construct
  source 1..21: mol_type = other RNA
  modified_base 1: mod_base = OTHER; note = 2'-O-methylguanosine-3'-phosphorothioate
  modified_base 2: mod_base = OTHER; note = 2'-O-methyladenosine-3'-phosphorothioate
  modified_base 3: mod_base = OTHER; note = 2'-O-methyladenosine-3'-phosphate
  modified_base 4: mod_base = OTHER; note = 2'-O-methyladenosine-3'-phosphate
  modified_base 5: mod_base = OTHER; note = 2'-O-methylguanosine-3'-phosphate
  modified_base 6: mod_base = OTHER; note = 2'-O-methyluridine-3'-phosphate
  modified_base 7: mod_base = OTHER; note = 2'-deoxy-2'-fluoroadenosine-3'-phosphate
  modified_base 8: mod_base = OTHER; note = 2'-O-methyladenosine-3'-phosphate
  modified_base 9: mod_base = OTHER; note = 2'-deoxy-2'-fluorouridine-3'-phosphate
  modified_base 10: mod_base = OTHER; note = 2'-deoxy-2'-fluoroguanosine-3'-phosphate
  modified_base 11: mod_base = OTHER; note = 2'-deoxy-2'-fluoroguanosine-3'-phosphate
  modified_base 12: mod_base = OTHER; note = 2'-O-methyladenosine-3'-phosphate
  modified_base 13: mod_base = OTHER; note = 2'-O-methylcytidine-3'-phosphate
  modified_base 14: mod_base = OTHER; note = 2'-O-methylcytidine-3'-phosphate
  modified_base 15: mod_base = OTHER; note = 2'-O-methyladenosine-3'-phosphate
  modified_base 16: mod_base = OTHER; note = 2'-O-methylguanosine-3'-phosphate
  modified_base 17: mod_base = OTHER; note = 2'-O-methyluridine-3'-phosphate
  modified_base 18: mod_base = OTHER; note = 2'-O-methylguanosine-3'-phosphate
  modified_base 19: mod_base = OTHER; note = 2'-O-methyladenosine-3'-phosphate
  modified_base 20: mod_base = OTHER; note = 2'-O-methyladenosine-3'-phosphate
  modified_base 21: mod_base = OTHER; note = 2'-O-methyluridine-3'-phosphate ((2S,4R)-1-[29-[[2-(acetylamino)-2-deoxy-beta-D-galactopyra nosyl]oxy]-14,14-bis[[3-[[3-[[5-[[2-(acetylamino)-2-deoxy-b eta-D-galactopyranosyl]oxy]-1-oxopentyl]amino]propyl]amino] -3-oxopropoxy]methyl]-1,12,19,25-tetraoxo-16-oxa-13,20,24-t riazanonacos-1-yl]-4-hydroxy-2-pyrrolidinyl)methyl ester
gaaagtaatggaccagtgaat

SEQ ID NO: 619 - RNA, 21 nt, synthetic construct
  source 1..21: mol_type = other RNA
  modified_base 1: mod_base = OTHER; note = 2'-O-methyladenosine-3'-phosphorothioate
  modified_base 2: mod_base = OTHER; note = 2'-O-methyladenosine-3'-phosphorothioate
  modified_base 3: mod_base = OTHER; note = 2'-O-methyladenosine-3'-phosphate
  modified_base 4: mod_base = OTHER; note = 2'-O-methylguanosine-3'-phosphate
  modified_base 5: mod_base = OTHER; note = 2'-O-methyluridine-3'-phosphate
  modified_base 6: mod_base = OTHER; note = 2'-O-methyladenosine-3'-phosphate
  modified_base 7: mod_base = OTHER; note = 2'-deoxy-2'-fluoroadenosine-3'-phosphate
  modified_base 8: mod_base = OTHER; note = 2'-O-methyluridine-3'-phosphate
  modified_base 9: mod_base = OTHER; note = 2'-deoxy-2'-fluoroguanosine-3'-phosphate
  modified_base 10: mod_base = OTHER; note = 2'-deoxy-2'-fluoroguanosine-3'-phosphate
  modified_base 11: mod_base = OTHER; note = 2'-deoxy-2'-fluoroadenosine-3'-phosphate
  modified_base 12: mod_base = OTHER; note = 2'-O-methylcytidine-3'-phosphate
  modified_base 13: mod_base = OTHER; note = 2'-O-methylcytidine-3'-phosphate
  modified_base 14: mod_base = OTHER; note = 2'-O-methyladenosine-3'-phosphate
  modified_base 15: mod_base = OTHER; note = 2'-O-methylguanosine-3'-phosphate
  modified_base 16: mod_base = OTHER; note = 2'-O-methyluridine-3'-phosphate
  modified_base 17: mod_base = OTHER; note = 2'-O-methylguanosine-3'-phosphate
  modified_base 18: mod_base = OTHER; note = 2'-O-methyladenosine-3'-phosphate
  modified_base 19: mod_base = OTHER; note = 2'-O-methyladenosine-3'-phosphate
  modified_base 20: mod_base = OTHER; note = 2'-O-methylguanosine-3'-phosphate
  modified_base 21: mod_base = OTHER; note = 2'-O-methyluridine-3'-phosphate ((2S,4R)-1-[29-[[2-(acetylamino)-2-deoxy-beta-D-galactopyra nosyl]oxy]-14,14-bis[[3-[[3-[[5-[[2-(acetylamino)-2-deoxy-b eta-D-galactopyranosyl]oxy]-1-oxopentyl]amino]propyl]amino] -3-oxopropoxy]methyl]-1,12,19,25-tetraoxo-16-oxa-13,20,24-t riazanonacos-1-yl]-4-hydroxy-2-pyrrolidinyl)methyl ester
aaagtaatggaccagtgaagt

SEQ ID NO: 620 - RNA, 21 nt, synthetic construct
  source 1..21: mol_type = other RNA
  modified_base 1: mod_base = OTHER; note = 2'-O-methyladenosine-3'-phosphorothioate
  modified_base 2: mod_base = OTHER; note = 2'-O-methyladenosine-3'-phosphorothioate
  modified_base 3: mod_base = OTHER; note = 2'-O-methylguanosine-3'-phosphate
  modified_base 4: mod_base = OTHER; note = 2'-O-methyluridine-3'-phosphate
  modified_base 5: mod_base = OTHER; note = 2'-O-methyladenosine-3'-phosphate
  modified_base 6: mod_base = OTHER; note = 2'-O-methyladenosine-3'-phosphate
  modified_base 7: mod_base = OTHER; note = 2'-deoxy-2'-fluorouridine-3'-phosphate
  modified_base 8: mod_base = OTHER; note = 2'-O-methylguanosine-3'-phosphate
  modified_base 9: mod_base = OTHER; note = 2'-deoxy-2'-fluoroguanosine-3'-phosphate
  modified_base 10: mod_base = OTHER; note = 2'-deoxy-2'-fluoroadenosine-3'-phosphate
  modified_base 11: mod_base = OTHER; note = 2'-deoxy-2'-fluorocytidine-3'-phosphate
  modified_base 12: mod_base = OTHER; note = 2'-O-methylcytidine-3'-phosphate
  modified_base 13: mod_base = OTHER; note = 2'-O-methyladenosine-3'-phosphate
  modified_base 14: mod_base = OTHER; note = 2'-O-methylguanosine-3'-phosphate
  modified_base 15: mod_base = OTHER; note = 2'-O-methyluridine-3'-phosphate
  modified_base 16: mod_base = OTHER; note = 2'-O-methylguanosine-3'-phosphate
  modified_base 17: mod_base = OTHER; note = 2'-O-methyladenosine-3'-phosphate
  modified_base 18: mod_base = OTHER; note = 2'-O-methyladenosine-3'-phosphate
  modified_base 19: mod_base = OTHER; note = 2'-O-methylguanosine-3'-phosphate
  modified_base 20: mod_base = OTHER; note = 2'-O-methylguanosine-3'-phosphate
  modified_base 21: mod_base = OTHER; note = 2'-O-methyluridine-3'-phosphate ((2S,4R)-1-[29-[[2-(acetylamino)-2-deoxy-beta-D-galactopyra nosyl]oxy]-14,14-bis[[3-[[3-[[5-[[2-(acetylamino)-2-deoxy-b eta-D-galactopyranosyl]oxy]-1-oxopentyl]amino]propyl]amino] -3-oxopropoxy]methyl]-1,12,19,25-tetraoxo-16-oxa-13,20,24-t riazanonacos-1-yl]-4-hydroxy-2-pyrrolidinyl)methyl ester
aagtaatggaccagtgaaggt

SEQ ID NO: 621 - RNA, 21 nt, synthetic construct
  source 1..21: mol_type = other RNA
  modified_base 1: mod_base = OTHER; note = 2'-O-methyladenosine-3'-phosphorothioate
  modified_base 2: mod_base = OTHER; note = 2'-O-methylguanosine-3'-phosphorothioate
  modified_base 3: mod_base = OTHER; note = 2'-O-methyluridine-3'-phosphate
  modified_base 4: mod_base = OTHER; note = 2'-O-methyladenosine-3'-phosphate
  modified_base 5: mod_base = OTHER; note = 2'-O-methyladenosine-3'-phosphate
  modified_base 6: mod_base = OTHER; note = 2'-O-methyluridine-3'-phosphate
  modified_base 7: mod_base = OTHER; note = 2'-deoxy-2'-fluoroguanosine-3'-phosphate
  modified_base 8: mod_base = OTHER; note = 2'-O-methylguanosine-3'-phosphate
  modified_base 9: mod_base = OTHER; note = 2'-deoxy-2'-fluoroadenosine-3'-phosphate
  modified_base 10: mod_base = OTHER; note = 2'-deoxy-2'-fluorocytidine-3'-phosphate
  modified_base 11: mod_base = OTHER; note = 2'-deoxy-2'-fluorocytidine-3'-phosphate
  modified_base 12: mod_base = OTHER; note = 2'-O-methyladenosine-3'-phosphate
  modified_base 13: mod_base = OTHER; note = 2'-O-methylguanosine-3'-phosphate
  modified_base 14: mod_base = OTHER; note = 2'-O-methyluridine-3'-phosphate
  modified_base 15: mod_base = OTHER; note = 2'-O-methylguanosine-3'-phosphate
  modified_base 16: mod_base = OTHER; note = 2'-O-methyladenosine-3'-phosphate
  modified_base 17: mod_base = OTHER; note = 2'-O-methyladenosine-3'-phosphate
  modified_base 18: mod_base = OTHER; note = 2'-O-methylguanosine-3'-phosphate
  modified_base 19: mod_base = OTHER; note = 2'-O-methylguanosine-3'-phosphate
  modified_base 20: mod_base = OTHER; note = 2'-O-methyluridine-3'-phosphate
  modified_base 21: mod_base = OTHER; note = 2'-O-methyluridine-3'-phosphate ((2S,4R)-1-[29-[[2-(acetylamino)-2-deoxy-beta-D-galactopyra nosyl]oxy]-14,14-bis[[3-[[3-[[5-[[2-(acetylamino)-2-deoxy-b eta-D-galactopyranosyl]oxy]-1-oxopentyl]amino]propyl]amino] -3-oxopropoxy]methyl]-1,12,19,25-tetraoxo-16-oxa-13,20,24-t riazanonacos-1-yl]-4-hydroxy-2-pyrrolidinyl)methyl ester
agtaatggaccagtgaaggtt

SEQ ID NO: 622 - RNA, 21 nt, synthetic construct
  source 1..21: mol_type = other RNA
  modified_base 1: mod_base = OTHER; note = 2'-O-methyluridine-3'-phosphorothioate
  modified_base 2: mod_base = OTHER; note = 2'-O-methylguanosine-3'-phosphorothioate
  modified_base 3: mod_base = OTHER; note = 2'-O-methyladenosine-3'-phosphate
  modified_base 4: mod_base = OTHER; note = 2'-O-methyladenosine-3'-phosphate
  modified_base 5: mod_base = OTHER; note = 2'-O-methylguanosine-3'-phosphate
  modified_base 6: mod_base = OTHER; note = 2'-O-methylguanosine-3'-phosphate
  modified_base 7: mod_base = OTHER; note = 2'-deoxy-2'-fluorocytidine-3'-phosphate
  modified_base 8: mod_base = OTHER; note = 2'-O-methylcytidine-3'-phosphate
  modified_base 9: mod_base = OTHER; note = 2'-deoxy-2'-fluorouridine-3'-phosphate
  modified_base 10: mod_base = OTHER; note = 2'-deoxy-2'-fluoroguanosine-3'-phosphate
  modified_base 11: mod_base = OTHER; note = 2'-deoxy-2'-fluorocytidine-3'-phosphate
  modified_base 12: mod_base = OTHER; note = 2'-O-methyladenosine-3'-phosphate
  modified_base 13: mod_base = OTHER; note = 2'-O-methyluridine-3'-phosphate
  modified_base 14: mod_base = OTHER; note = 2'-O-methylguanosine-3'-phosphate
  modified_base 15: mod_base = OTHER; note = 2'-O-methylguanosine-3'-phosphate
  modified_base 16: mod_base = OTHER; note = 2'-O-methyladenosine-3'-phosphate
  modified_base 17: mod_base = OTHER; note = 2'-O-methyluridine-3'-phosphate
  modified_base 18: mod_base = OTHER; note = 2'-O-methyluridine-3'-phosphate
  modified_base 19: mod_base = OTHER; note = 2'-O-methylcytidine-3'-phosphate
  modified_base 20: mod_base = OTHER; note = 2'-O-methylcytidine-3'-phosphate
  modified_base 21: mod_base = OTHER; note = 2'-O-methyladenosine-3'-phosphate ((2S,4R)-1-[29-[[2-(acetylamino)-2-deoxy-beta-D-galactopyra nosyl]oxy]-14,14-bis[[3-[[3-[[5-[[2-(acetylamino)-2-deoxy-b eta-D-galactopyranosyl]oxy]-1-oxopentyl]amino]propyl]amino] -3-oxopropoxy]methyl]-1,12,19,25-tetraoxo-16-oxa-13,20,24-t riazanonacos-1-yl]-4-hydroxy-2-pyrrolidinyl)methyl ester
tgaaggcctgcatggattcca

SEQ ID NO: 623 - RNA, 21 nt, synthetic construct
  source 1..21: mol_type = other RNA
  modified_base 1: mod_base = OTHER; note = 2'-O-methylguanosine-3'-phosphorothioate
  modified_base 2: mod_base = OTHER; note = 2'-O-methyladenosine-3'-phosphorothioate
  modified_base 3: mod_base = OTHER; note = 2'-O-methyladenosine-3'-phosphate
  modified_base 4: mod_base = OTHER; note = 2'-O-methylguanosine-3'-phosphate
  modified_base 5: mod_base = OTHER; note = 2'-O-methylguanosine-3'-phosphate
  modified_base 6: mod_base = OTHER; note = 2'-O-methylcytidine-3'-phosphate
  modified_base 7: mod_base = OTHER; note = 2'-deoxy-2'-fluorocytidine-3'-phosphate
  modified_base 8: mod_base = OTHER; note = 2'-O-methyluridine-3'-phosphate
  modified_base 9: mod_base = OTHER; note = 2'-deoxy-2'-fluoroguanosine-3'-phosphate
  modified_base 10: mod_base = OTHER; note = 2'-deoxy-2'-fluorocytidine-3'-phosphate
  modified_base 11: mod_base = OTHER; note = 2'-deoxy-2'-fluoroadenosine-3'-phosphate
  modified_base 12: mod_base = OTHER; note = 2'-O-methyluridine-3'-phosphate
  modified_base 13: mod_base = OTHER; note = 2'-O-methylguanosine-3'-phosphate
  modified_base 14: mod_base = OTHER; note = 2'-O-methylguanosine-3'-phosphate
  modified_base 15: mod_base = OTHER; note = 2'-O-methyladenosine-3'-phosphate
  modified_base 16: mod_base = OTHER; note = 2'-O-methyluridine-3'-phosphate
  modified_base 17: mod_base = OTHER; note = 2'-O-methyluridine-3'-phosphate
  modified_base 18: mod_base = OTHER; note = 2'-O-methylcytidine-3'-phosphate
  modified_base 19: mod_base = OTHER; note = 2'-O-methylcytidine-3'-phosphate
  modified_base 20: mod_base = OTHER; note = 2'-O-methyladenosine-3'-phosphate
  modified_base 21: mod_base = OTHER; note = 2'-O-methyluridine-3'-phosphate ((2S,4R)-1-[29-[[2-(acetylamino)-2-deoxy-beta-D-galactopyra nosyl]oxy]-14,14-bis[[3-[[3-[[5-[[2-(acetylamino)-2-deoxy-b eta-D-galactopyranosyl]oxy]-1-oxopentyl]amino]propyl]amino] -3-oxopropoxy]methyl]-1,12,19,25-tetraoxo-16-oxa-13,20,24-t riazanonacos-1-yl]-4-hydroxy-2-pyrrolidinyl)methyl ester
gaaggcctgcatggattccat

SEQ ID NO: 624 - RNA, 21 nt, synthetic construct
  source 1..21: mol_type = other RNA
  modified_base 1: mod_base = OTHER; note = 2'-O-methyladenosine-3'-phosphorothioate
  modified_base 2: mod_base = OTHER; note = 2'-O-methylguanosine-3'-phosphorothioate
  modified_base 3: mod_base = OTHER; note = 2'-O-methylguanosine-3'-phosphate
  modified_base 4: mod_base = OTHER; note = 2'-O-methylcytidine-3'-phosphate
  modified_base 5: mod_base = OTHER; note = 2'-O-methylcytidine-3'-phosphate
  modified_base 6: mod_base = OTHER; note = 2'-O-methyluridine-3'-phosphate
  modified_base 7: mod_base = OTHER; note = 2'-deoxy-2'-fluoroguanosine-3'-phosphate
  modified_base 8: mod_base = OTHER; note = 2'-O-methylcytidine-3'-phosphate
  modified_base 9: mod_base = OTHER; note = 2'-deoxy-2'-fluoroadenosine-3'-phosphate
  modified_base 10: mod_base = OTHER; note = 2'-deoxy-2'-fluorouridine-3'-phosphate
  modified_base 11: mod_base = OTHER; note = 2'-deoxy-2'-fluoroguanosine-3'-phosphate
  modified_base 12: mod_base = OTHER; note = 2'-O-methylguanosine-3'-phosphate
  modified_base 13: mod_base = OTHER; note = 2'-O-methyladenosine-3'-phosphate
  modified_base 14: mod_base = OTHER; note = 2'-O-methyluridine-3'-phosphate
  modified_base 15: mod_base = OTHER; note = 2'-O-methyluridine-3'-phosphate
  modified_base 16: mod_base = OTHER; note = 2'-O-methylcytidine-3'-phosphate
  modified_base 17: mod_base = OTHER; note = 2'-O-methylcytidine-3'-phosphate
  modified_base 18: mod_base = OTHER; note = 2'-O-methyladenosine-3'-phosphate
  modified_base 19: mod_base = OTHER; note = 2'-O-methyluridine-3'-phosphate
  modified_base 20: mod_base = OTHER; note = 2'-O-methylguanosine-3'-phosphate
  modified_base 21: mod_base = OTHER; note = 2'-O-methyluridine-3'-phosphate ((2S,4R)-1-[29-[[2-(acetylamino)-2-deoxy-beta-D-galactopyra nosyl]oxy]-14,14-bis[[3-[[3-[[5-[[2-(acetylamino)-2-deoxy-b eta-D-galactopyranosyl]oxy]-1-oxopentyl]amino]propyl]amino] -3-oxopropoxy]methyl]-1,12,19,25-tetraoxo-16-oxa-13,20,24-t riazanonacos-1-yl]-4-hydroxy-2-pyrrolidinyl)methyl ester
aggcctgcatggattccatgt

SEQ ID NO: 625 - RNA, 21 nt, synthetic construct
  source 1..21: mol_type = other RNA
  modified_base 1: mod_base = OTHER; note = 2'-O-methylguanosine-3'-phosphorothioate
  modified_base 2: mod_base = OTHER; note = 2'-O-methylguanosine-3'-phosphorothioate
  modified_base 3: mod_base = OTHER; note = 2'-O-methylcytidine-3'-phosphate
  modified_base 4: mod_base = OTHER; note = 2'-O-methylcytidine-3'-phosphate
  modified_base 5: mod_base = OTHER; note = 2'-O-methyluridine-3'-phosphate
  modified_base 6: mod_base = OTHER; note = 2'-O-methylguanosine-3'-phosphate
  modified_base 7: mod_base = OTHER; note = 2'-deoxy-2'-fluorocytidine-3'-phosphate
  modified_base 8: mod_base = OTHER; note = 2'-O-methyladenosine-3'-phosphate
  modified_base 9: mod_base = OTHER; note = 2'-deoxy-2'-fluorouridine-3'-phosphate
  modified_base 10: mod_base = OTHER; note = 2'-deoxy-2'-fluoroguanosine-3'-phosphate
  modified_base 11: mod_base = OTHER; note = 2'-deoxy-2'-fluoroguanosine-3'-phosphate
  modified_base 12: mod_base = OTHER; note = 2'-O-methyladenosine-3'-phosphate
  modified_base 13: mod_base = OTHER; note = 2'-O-methyluridine-3'-phosphate
  modified_base 14: mod_base = OTHER; note = 2'-O-methyluridine-3'-phosphate
  modified_base 15: mod_base = OTHER; note = 2'-O-methylcytidine-3'-phosphate
  modified_base 16: mod_base = OTHER; note = 2'-O-methylcytidine-3'-phosphate
  modified_base 17: mod_base = OTHER; note = 2'-O-methyladenosine-3'-phosphate
  modified_base 18: mod_base = OTHER; note = 2'-O-methyluridine-3'-phosphate
  modified_base 19: mod_base = OTHER; note = 2'-O-methylguanosine-3'-phosphate
  modified_base 20: mod_base = OTHER; note = 2'-O-methyluridine-3'-phosphate
  modified_base 21: mod_base = OTHER; note = 2'-O-methyluridine-3'-phosphate ((2S,4R)-1-[29-[[2-(acetylamino)-2-deoxy-beta-D-galactopyra nosyl]oxy]-14,14-bis[[3-[[3-[[5-[[2-(acetylamino)-2-deoxy-b eta-D-galactopyranosyl]oxy]-1-oxopentyl]amino]propyl]amino] -3-oxopropoxy]methyl]-1,12,19,25-tetraoxo-16-oxa-13,20,24-t riazanonacos-1-yl]-4-hydroxy-2-pyrrolidinyl)methyl ester
ggcctgcatggattccatgtt

SEQ ID NO: 626 - RNA, 21 nt, synthetic construct
  source 1..21: mol_type = other RNA
  modified_base 1: mod_base = OTHER; note = 2'-O-methylguanosine-3'-phosphorothioate
  modified_base 2: mod_base = OTHER; note = 2'-O-methylcytidine-3'-phosphorothioate
  modified_base 3: mod_base = OTHER; note = 2'-O-methylcytidine-3'-phosphate
  modified_base 4: mod_base = OTHER; note = 2'-O-methyluridine-3'-phosphate
  modified_base 5: mod_base = OTHER; note = 2'-O-methylguanosine-3'-phosphate
  modified_base 6: mod_base = OTHER; note = 2'-O-methylcytidine-3'-phosphate
  modified_base 7: mod_base = OTHER; note = 2'-deoxy-2'-fluoroadenosine-3'-phosphate
  modified_base 8: mod_base = OTHER; note = 2'-O-methyluridine-3'-phosphate
  modified_base 9: mod_base = OTHER; note = 2'-deoxy-2'-fluoroguanosine-3'-phosphate
  modified_base 10: mod_base = OTHER; note = 2'-deoxy-2'-fluoroguanosine-3'-phosphate
  modified_base 11: mod_base = OTHER; note = 2'-deoxy-2'-fluoroadenosine-3'-phosphate
  modified_base 12: mod_base = OTHER; note = 2'-O-methyluridine-3'-phosphate
  modified_base 13: mod_base = OTHER; note = 2'-O-methyluridine-3'-phosphate
  modified_base 14: mod_base = OTHER; note = 2'-O-methylcytidine-3'-phosphate
  modified_base 15: mod_base = OTHER; note = 2'-O-methylcytidine-3'-phosphate
  modified_base 16: mod_base = OTHER; note = 2'-O-methyladenosine-3'-phosphate
  modified_base 17: mod_base = OTHER; note = 2'-O-methyluridine-3'-phosphate
  modified_base 18: mod_base = OTHER; note = 2'-O-methylguanosine-3'-phosphate
  modified_base 19: mod_base = OTHER; note = 2'-O-methyluridine-3'-phosphate
  modified_base 20: mod_base = OTHER; note = 2'-O-methyluridine-3'-phosphate
  modified_base 21: mod_base = OTHER; note = 2'-O-methyluridine-3'-phosphate ((2S,4R)-1-[29-[[2-(acetylamino)-2-deoxy-beta-D-galactopyra nosyl]oxy]-14,14-bis[[3-[[3-[[5-[[2-(acetylamino)-2-deoxy-b eta-D-galactopyranosyl]oxy]-1-oxopentyl]amino]propyl]amino] -3-oxopropoxy]methyl]-1,12,19,25-tetraoxo-16-oxa-13,20,24-t riazanonacos-1-yl]-4-hydroxy-2-pyrrolidinyl)methyl ester
gcctgcatggattccatgttt

SEQ ID NO: 627 - RNA, 21 nt, synthetic construct
  source 1..21: mol_type = other RNA
  modified_base 1: mod_base = OTHER; note = 2'-O-methylcytidine-3'-phosphorothioate
  modified_base 2: mod_base = OTHER; note = 2'-O-methylcytidine-3'-phosphorothioate
  modified_base 3: mod_base = OTHER; note = 2'-O-methyluridine-3'-phosphate
  modified_base 4: mod_base = OTHER; note = 2'-O-methylguanosine-3'-phosphate
  modified_base 5: mod_base = OTHER; note = 2'-O-methylcytidine-3'-phosphate
  modified_base 6: mod_base = OTHER; note = 2'-O-methyladenosine-3'-phosphate
  modified_base 7: mod_base = OTHER; note = 2'-deoxy-2'-fluorouridine-3'-phosphate
  modified_base 8: mod_base = OTHER; note = 2'-O-methylguanosine-3'-phosphate
  modified_base 9: mod_base = OTHER; note = 2'-deoxy-2'-fluoroguanosine-3'-phosphate
  modified_base 10: mod_base = OTHER; note = 2'-deoxy-2'-fluoroadenosine-3'-phosphate
  modified_base 11: mod_base = OTHER; note = 2'-deoxy-2'-fluorouridine-3'-phosphate
  modified_base 12: mod_base = OTHER; note = 2'-O-methyluridine-3'-phosphate
  modified_base 13: mod_base = OTHER; note = 2'-O-methylcytidine-3'-phosphate
  modified_base 14: mod_base = OTHER; note = 2'-O-methylcytidine-3'-phosphate
  modified_base 15: mod_base = OTHER; note = 2'-O-methyladenosine-3'-phosphate
  modified_base 16: mod_base = OTHER; note = 2'-O-methyluridine-3'-phosphate
  modified_base 17: mod_base = OTHER; note = 2'-O-methylguanosine-3'-phosphate
  modified_base 18: mod_base = OTHER; note = 2'-O-methyluridine-3'-phosphate
  modified_base 19: mod_base = OTHER; note = 2'-O-methyluridine-3'-phosphate
  modified_base 20: mod_base = OTHER; note = 2'-O-methylcytidine-3'-phosphate
  modified_base 21: mod_base = OTHER; note = 2'-O-methyladenosine-3'-phosphate ((2S,4R)-1-[29-[[2-(acetylamino)-2-deoxy-beta-D-galactopyra nosyl]oxy]-14,14-bis[[3-[[3-[[5-[[2-(acetylamino)-2-deoxy-b eta-D-galactopyranosyl]oxy]-1-oxopentyl]amino]propyl]amino] -3-oxopropoxy]methyl]-1,12,19,25-tetraoxo-16-oxa-13,20,24-t riazanonacos-1-yl]-4-hydroxy-2-pyrrolidinyl)methyl ester
cctgcatggattccatgttca

SEQ ID NO: 628 - RNA, 21 nt, synthetic construct
  source 1..21: mol_type = other RNA
  modified_base 1: mod_base = OTHER; note = 2'-O-methylcytidine-3'-phosphorothioate
  modified_base 2: mod_base = OTHER; note = 2'-O-methyluridine-3'-phosphorothioate
  modified_base 3: mod_base = OTHER; note = 2'-O-methylguanosine-3'-phosphate
  modified_base 4: mod_base = OTHER; note = 2'-O-methylcytidine-3'-phosphate
  modified_base 5: mod_base = OTHER; note = 2'-O-methyladenosine-3'-phosphate
  modified_base 6: mod_base = OTHER; note = 2'-O-methyluridine-3'-phosphate
  modified_base 7: mod_base = OTHER; note = 2'-deoxy-2'-fluoroguanosine-3'-phosphate
  modified_base 8: mod_base = OTHER; note = 2'-O-methylguanosine-3'-phosphate
  modified_base 9: mod_base = OTHER; note = 2'-deoxy-2'-fluoroadenosine-3'-phosphate
  modified_base 10: mod_base = OTHER; note = 2'-deoxy-2'-fluorouridine-3'-phosphate
  modified_base 11: mod_base = OTHER; note = 2'-deoxy-2'-fluorouridine-3'-phosphate
  modified_base 12: mod_base = OTHER; note = 2'-O-methylcytidine-3'-phosphate
  modified_base 13: mod_base = OTHER; note = 2'-O-methylcytidine-3'-phosphate
  modified_base 14: mod_base = OTHER; note = 2'-O-methyladenosine-3'-phosphate
  modified_base 15: mod_base = OTHER; note = 2'-O-methyluridine-3'-phosphate
  modified_base 16: mod_base = OTHER; note = 2'-O-methylguanosine-3'-phosphate
  modified_base 17: mod_base = OTHER; note = 2'-O-methyluridine-3'-phosphate
  modified_base 18: mod_base = OTHER; note = 2'-O-methyluridine-3'-phosphate
  modified_base 19: mod_base = OTHER; note = 2'-O-methylcytidine-3'-phosphate
  modified_base 20: mod_base = OTHER; note = 2'-O-methyladenosine-3'-phosphate
  modified_base 21: mod_base = OTHER; note = 2'-O-methyluridine-3'-phosphate ((2S,4R)-1-[29-[[2-(acetylamino)-2-deoxy-beta-D-galactopyra nosyl]oxy]-14,14-bis[[3-[[3-[[5-[[2-(acetylamino)-2-deoxy-b eta-D-galactopyranosyl]oxy]-1-oxopentyl]amino]propyl]amino] -3-oxopropoxy]methyl]-1,12,19,25-tetraoxo-16-oxa-13,20,24-t riazanonacos-1-yl]-4-hydroxy-2-pyrrolidinyl)methyl ester
ctgcatggattccatgttcat

SEQ ID NO: 629 - RNA, 21 nt, synthetic construct
  source 1..21: mol_type = other RNA
  modified_base 1: mod_base = OTHER; note = 2'-O-methylguanosine-3'-phosphorothioate
  modified_base 2: mod_base = OTHER; note = 2'-O-methylguanosine-3'-phosphorothioate
  modified_base 3: mod_base = OTHER; note = 2'-O-methyluridine-3'-phosphate
  modified_base 4: mod_base = OTHER; note = 2'-O-methylguanosine-3'-phosphate
  modified_base 5: mod_base = OTHER; note = 2'-O-methylguanosine-3'-phosphate
  modified_base 6: mod_base = OTHER; note = 2'-O-methylguanosine-3'-phosphate
  modified_base 7: mod_base = OTHER; note = 2'-deoxy-2'-fluorocytidine-3'-phosphate
  modified_base 8: mod_base = OTHER; note = 2'-O-methylcytidine-3'-phosphate
  modified_base 9: mod_base = OTHER; note = 2'-deoxy-2'-fluoroadenosine-3'-phosphate
  modified_base 10: mod_base = OTHER; note = 2'-deoxy-2'-fluoroadenosine-3'-phosphate
  modified_base 11: mod_base = OTHER; note = 2'-deoxy-2'-fluoroadenosine-3'-phosphate
  modified_base 12: mod_base = OTHER; note = 2'-O-methylguanosine-3'-phosphate
  modified_base 13: mod_base = OTHER; note = 2'-O-methylguanosine-3'-phosphate
  modified_base 14: mod_base = OTHER; note = 2'-O-methyladenosine-3'-phosphate
  modified_base 15: mod_base = OTHER; note = 2'-O-methyluridine-3'-phosphate
  modified_base 16: mod_base = OTHER; note = 2'-O-methylguanosine-3'-phosphate
  modified_base 17: mod_base = OTHER; note = 2'-O-methyladenosine-3'-phosphate
  modified_base 18: mod_base = OTHER; note = 2'-O-methyladenosine-3'-phosphate
  modified_base 19: mod_base = OTHER; note = 2'-O-methylguanosine-3'-phosphate
  modified_base 20: mod_base = OTHER; note = 2'-O-methyladenosine-3'-phosphate
  modified_base 21: mod_base = OTHER; note = 2'-O-methyluridine-3'-phosphate ((2S,4R)-1-[29-[[2-(acetylamino)-2-deoxy-beta-D-galactopyra nosyl]oxy]-14,14-bis[[3-[[3-[[5-[[2-(acetylamino)-2-deoxy-b eta-D-galactopyranosyl]oxy]-1-oxopentyl]amino]propyl]amino] -3-oxopropoxy]methyl]-1,12,19,25-tetraoxo-16-oxa-13,20,24-t riazanonacos-1-yl]-4-hydroxy-2-pyrrolidinyl)methyl ester
ggtgggccaaaggatgaagat

SEQ ID NO: 630 - RNA, 21 nt, synthetic construct
  source 1..21: mol_type = other RNA
  modified_base 1: mod_base = OTHER; note = 2'-O-methylguanosine-3'-phosphorothioate
  modified_base 2: mod_base = OTHER; note = 2'-O-methyladenosine-3'-phosphorothioate
  modified_base 3: mod_base = OTHER; note = 2'-O-methyluridine-3'-phosphate
  modified_base 4: mod_base = OTHER; note = 2'-O-methylguanosine-3'-phosphate
  modified_base 5: mod_base = OTHER; note = 2'-O-methyladenosine-3'-phosphate
  modified_base 6: mod_base = OTHER; note = 2'-O-methyladenosine-3'-phosphate
  modified_base 7: mod_base = OTHER; note = 2'-deoxy-2'-fluoroguanosine-3'-phosphate
  modified_base 8: mod_base = OTHER; note = 2'-O-methyladenosine-3'-phosphate
  modified_base 9: mod_base = OTHER; note = 2'-deoxy-2'-fluoroguanosine-3'-phosphate
  modified_base 10: mod_base = OTHER; note = 2'-deoxy-2'-fluoroadenosine-3'-phosphate
  modified_base 11: mod_base = OTHER; note = 2'-deoxy-2'-fluoroguanosine-3'-phosphate
  modified_base 12: mod_base = OTHER; note = 2'-O-methylguanosine-3'-phosphate
  modified_base 13: mod_base = OTHER; note = 2'-O-methylcytidine-3'-phosphate
  modified_base 14: mod_base = OTHER; note = 2'-O-methyladenosine-3'-phosphate
  modified_base 15: mod_base = OTHER; note = 2'-O-methyluridine-3'-phosphate
  modified_base 16: mod_base = OTHER; note = 2'-O-methylguanosine-3'-phosphate
  modified_base 17: mod_base = OTHER; note = 2'-O-methyluridine-3'-phosphate
  modified_base 18: mod_base = OTHER; note = 2'-O-methyluridine-3'-phosphate
  modified_base 19: mod_base = OTHER; note = 2'-O-methylguanosine-3'-phosphate
  modified_base 20: mod_base = OTHER; note = 2'-O-methylguanosine-3'-phosphate
  modified_base 21: mod_base = OTHER; note = 2'-O-methyladenosine-3'-phosphate ((2S,4R)-1-[29-[[2-(acetylamino)-2-deoxy-beta-D-galactopyra nosyl]oxy]-14,14-bis[[3-[[3-[[5-[[2-(acetylamino)-2-deoxy-b eta-D-galactopyranosyl]oxy]-1-oxopentyl]amino]propyl]amino] -3-oxopropoxy]methyl]-1,12,19,25-tetraoxo-16-oxa-13,20,24-t riazanonacos-1-yl]-4-hydroxy-2-pyrrolidinyl)methyl ester
gatgaagagaggcatgttgga

SEQ ID NO: 631 - RNA, 21 nt, synthetic construct
  source 1..21: mol_type = other RNA
  modified_base 1: mod_base = OTHER; note = 2'-O-methylcytidine-3'-phosphorothioate
  modified_base 2: mod_base = OTHER; note = 2'-O-methyladenosine-3'-phosphorothioate
  modified_base 3: mod_base = OTHER; note = 2'-O-methyladenosine-3'-phosphate
  modified_base 4: mod_base = OTHER; note = 2'-O-methyladenosine-3'-phosphate
  modified_base 5: mod_base = OTHER; note = 2'-O-methylguanosine-3'-phosphate
  modified_base 6: mod_base = OTHER; note = 2'-O-methylguanosine-3'-phosphate
  modified_base 7: mod_base = OTHER; note = 2'-deoxy-2'-fluoroadenosine-3'-phosphate
  modified_base 8: mod_base = OTHER; note = 2'-O-methyluridine-3'-phosphate
  modified_base 9: mod_base = OTHER; note = 2'-deoxy-2'-fluoroguanosine-3'-phosphate
  modified_base 10: mod_base = OTHER; note = 2'-deoxy-2'-fluoroadenosine-3'-phosphate
  modified_base 11: mod_base = OTHER; note = 2'-deoxy-2'-fluoroadenosine-3'-phosphate
  modified_base 12: mod_base = OTHER; note = 2'-O-methylguanosine-3'-phosphate
  modified_base 13: mod_base = OTHER; note = 2'-O-methyladenosine-3'-phosphate
  modified_base 14: mod_base = OTHER; note = 2'-O-methylguanosine-3'-phosphate
  modified_base 15: mod_base = OTHER; note = 2'-O-methyladenosine-3'-phosphate
  modified_base 16: mod_base = OTHER; note = 2'-O-methylguanosine-3'-phosphate
  modified_base 17: mod_base = OTHER; note = 2'-O-methylguanosine-3'-phosphate
  modified_base 18: mod_base = OTHER; note = 2'-O-methylcytidine-3'-phosphate
  modified_base 19: mod_base = OTHER; note = 2'-O-methyladenosine-3'-phosphate
  modified_base 20: mod_base = OTHER; note = 2'-O-methyluridine-3'-phosphate
  modified_base 21: mod_base = OTHER; note = 2'-O-methyluridine-3'-phosphate ((2S,4R)-1-[29-[[2-(acetylamino)-2-deoxy-beta-D-galactopyra nosyl]oxy]-14,14-bis[[3-[[3-[[5-[[2-(acetylamino)-2-deoxy-b eta-D-galactopyranosyl]oxy]-1-oxopentyl]amino]propyl]amino] -3-oxopropoxy]methyl]-1,12,19,25-tetraoxo-16-oxa-13,20,24-t riazanonacos-1-yl]-4-hydroxy-2-pyrrolidinyl)methyl ester
caaaggatgaagagaggcatt

SEQ ID NO: 632 - RNA, 21 nt, synthetic construct
  source 1..21: mol_type = other RNA
  modified_base 1: mod_base = OTHER; note = 2'-O-methyladenosine-3'-phosphorothioate
  modified_base 2: mod_base = OTHER; note = 2'-O-methyladenosine-3'-phosphorothioate
  modified_base 3: mod_base = OTHER; note = 2'-O-methylguanosine-3'-phosphate
  modified_base 4: mod_base = OTHER; note = 2'-O-methylguanosine-3'-phosphate
  modified_base 5: mod_base = OTHER; note = 2'-O-methyladenosine-3'-phosphate
  modified_base 6: mod_base = OTHER; note = 2'-O-methyluridine-3'-phosphate
  modified_base 7: mod_base = OTHER; note = 2'-deoxy-2'-fluoroguanosine-3'-phosphate
  modified_base 8: mod_base = OTHER; note = 2'-O-methyladenosine-3'-phosphate
  modified_base 9: mod_base = OTHER; note = 2'-deoxy-2'-fluoroadenosine-3'-phosphate
  modified_base 10: mod_base = OTHER; note = 2'-deoxy-2'-fluoroguanosine-3'-phosphate
  modified_base 11: mod_base = OTHER; note = 2'-deoxy-2'-fluoroadenosine-3'-phosphate
  modified_base 12: mod_base = OTHER; note = 2'-O-methylguanosine-3'-phosphate
  modified_base 13: mod_base = OTHER; note = 2'-O-methyladenosine-3'-phosphate
  modified_base 14: mod_base = OTHER; note = 2'-O-methylguanosine-3'-phosphate
  modified_base 15: mod_base = OTHER; note = 2'-O-methylguanosine-3'-phosphate
  modified_base 16: mod_base = OTHER; note = 2'-O-methylcytidine-3'-phosphate
  modified_base 17: mod_base = OTHER; note = 2'-O-methyladenosine-3'-phosphate
  modified_base 18: mod_base = OTHER; note = 2'-O-methyluridine-3'-phosphate
  modified_base 19: mod_base = OTHER; note = 2'-O-methylguanosine-3'-phosphate
  modified_base 20: mod_base = OTHER; note = 2'-O-methyluridine-3'-phosphate
  modified_base 21: mod_base = OTHER; note = 2'-O-methyluridine-3'-phosphate ((2S,4R)-1-[29-[[2-(acetylamino)-2-deoxy-beta-D-galactopyra nosyl]oxy]-14,14-bis[[3-[[3-[[5-[[2-(acetylamino)-2-deoxy-b eta-D-galactopyranosyl]oxy]-1-oxopentyl]amino]propyl]amino] -3-oxopropoxy]methyl]-1,12,19,25-tetraoxo-16-oxa-13,20,24-t riazanonacos-1-yl]-4-hydroxy-2-pyrrolidinyl)methyl ester
aaggatgaagagaggcatgtt

SEQ ID NO: 633 - RNA, 21 nt, synthetic construct
  source 1..21: mol_type = other RNA
  modified_base 1: mod_base = OTHER; note = 2'-O-methyladenosine-3'-phosphorothioate
  modified_base 2: mod_base = OTHER; note = 2'-O-methylguanosine-3'-phosphorothioate
  modified_base 3: mod_base = OTHER; note = 2'-O-methylguanosine-3'-phosphate
  modified_base 4: mod_base = OTHER; note = 2'-O-methyladenosine-3'-phosphate
  modified_base 5: mod_base = OTHER; note = 2'-O-methyluridine-3'-phosphate
  modified_base 6: mod_base = OTHER; note = 2'-O-methylguanosine-3'-phosphate
  modified_base 7: mod_base = OTHER; note = 2'-deoxy-2'-fluoroadenosine-3'-phosphate
  modified_base 8: mod_base = OTHER; note = 2'-O-methyladenosine-3'-phosphate
  modified_base 9: mod_base = OTHER; note = 2'-deoxy-2'-fluoroguanosine-3'-phosphate
  modified_base 10: mod_base = OTHER; note = 2'-deoxy-2'-fluoroadenosine-3'-phosphate
  modified_base 11: mod_base = OTHER; note = 2'-deoxy-2'-fluoroguanosine-3'-phosphate
  modified_base 12: mod_base = OTHER; note = 2'-O-methyladenosine-3'-phosphate
  modified_base 13: mod_base = OTHER; note = 2'-O-methylguanosine-3'-phosphate
  modified_base 14: mod_base = OTHER; note = 2'-O-methylguanosine-3'-phosphate
  modified_base 15: mod_base = OTHER; note = 2'-O-methylcytidine-3'-phosphate
  modified_base 16: mod_base = OTHER; note = 2'-O-methyladenosine-3'-phosphate
  modified_base 17: mod_base = OTHER; note = 2'-O-methyluridine-3'-phosphate
  modified_base 18: mod_base = OTHER; note = 2'-O-methylguanosine-3'-phosphate
  modified_base 19: mod_base = OTHER; note = 2'-O-methyluridine-3'-phosphate
  modified_base 20: mod_base = OTHER; note = 2'-O-methyluridine-3'-phosphate
  modified_base 21: mod_base = OTHER; note = 2'-O-methyluridine-3'-phosphate ((2S,4R)-1-[29-[[2-(acetylamino)-2-deoxy-beta-D-galactopyra nosyl]oxy]-14,14-bis[[3-[[3-[[5-[[2-(acetylamino)-2-deoxy-b eta-D-galactopyranosyl]oxy]-1-oxopentyl]amino]propyl]amino] -3-oxopropoxy]methyl]-1,12,19,25-tetraoxo-16-oxa-13,20,24-t riazanonacos-1-yl]-4-hydroxy-2-pyrrolidinyl)methyl ester
aggatgaagagaggcatgttt

SEQ ID NO: 634 - RNA, 21 nt, synthetic construct
  source 1..21: mol_type = other RNA
  modified_base 1: mod_base = OTHER; note = 2'-O-methylguanosine-3'-phosphorothioate
  modified_base 2: mod_base = OTHER; note = 2'-O-methylguanosine-3'-phosphorothioate
  modified_base 3: mod_base = OTHER; note = 2'-O-methyladenosine-3'-phosphate
  modified_base 4: mod_base = OTHER; note = 2'-O-methyluridine-3'-phosphate
  modified_base 5: mod_base = OTHER; note = 2'-O-methylguanosine-3'-phosphate
  modified_base 6: mod_base = OTHER; note = 2'-O-methyladenosine-3'-phosphate
  modified_base 7: mod_base = OTHER; note = 2'-deoxy-2'-fluoroadenosine-3'-phosphate
  modified_base 8: mod_base = OTHER; note = 2'-O-methylguanosine-3'-phosphate
  modified_base 9: mod_base = OTHER; note = 2'-deoxy-2'-fluoroadenosine-3'-phosphate
  modified_base 10: mod_base = OTHER; note = 2'-deoxy-2'-fluoroguanosine-3'-phosphate
  modified_base 11: mod_base = OTHER; note = 2'-deoxy-2'-fluoroadenosine-3'-phosphate
  modified_base 12: mod_base = OTHER; note = 2'-O-methylguanosine-3'-phosphate
  modified_base 13: mod_base = OTHER; note = 2'-O-methylguanosine-3'-phosphate
  modified_base 14: mod_base = OTHER; note = 2'-O-methylcytidine-3'-phosphate
  modified_base 15: mod_base = OTHER; note = 2'-O-methyladenosine-3'-phosphate
  modified_base 16: mod_base = OTHER; note = 2'-O-methyluridine-3'-phosphate
  modified_base 17: mod_base = OTHER; note = 2'-O-methylguanosine-3'-phosphate
  modified_base 18: mod_base = OTHER; note = 2'-O-methyluridine-3'-phosphate
  modified_base 19: mod_base = OTHER; note = 2'-O-methyluridine-3'-phosphate
  modified_base 20: mod_base = OTHER; note = 2'-O-methylguanosine-3'-phosphate
  modified_base 21: mod_base = OTHER; note = 2'-O-methyluridine-3'-phosphate ((2S,4R)-1-[29-[[2-(acetylamino)-2-deoxy-beta-D-galactopyra nosyl]oxy]-14,14-bis[[3-[[3-[[5-[[2-(acetylamino)-2-deoxy-b eta-D-galactopyranosyl]oxy]-1-oxopentyl]amino]propyl]amino] -3-oxopropoxy]methyl]-1,12,19,25-tetraoxo-16-oxa-13,20,24-t riazanonacos-1-yl]-4-hydroxy-2-pyrrolidinyl)methyl ester
ggatgaagagaggcatgttgt

SEQ ID NO: 635 - RNA, 21 nt, synthetic construct
  source 1..21: mol_type = other RNA
  modified_base 1: mod_base = OTHER; note = 2'-O-methyladenosine-3'-phosphorothioate
  modified_base 2: mod_base = OTHER; note = 2'-O-methyluridine-3'-phosphorothioate
  modified_base 3: mod_base = OTHER; note = 2'-O-methylguanosine-3'-phosphate
  modified_base 4: mod_base = OTHER; note = 2'-O-methyladenosine-3'-phosphate
  modified_base 5: mod_base = OTHER; note = 2'-O-methyladenosine-3'-phosphate
  modified_base 6: mod_base = OTHER; note = 2'-O-methylguanosine-3'-phosphate
  modified_base 7: mod_base = OTHER; note = 2'-deoxy-2'-fluoroadenosine-3'-phosphate
  modified_base 8: mod_base = OTHER; note = 2'-O-methylguanosine-3'-phosphate
  modified_base 9: mod_base = OTHER; note = 2'-deoxy-2'-fluoroadenosine-3'-phosphate
  modified_base 10: mod_base = OTHER; note = 2'-deoxy-2'-fluoroguanosine-3'-phosphate
  modified_base 11: mod_base = OTHER; note = 2'-deoxy-2'-fluoroguanosine-3'-phosphate
  modified_base 12: mod_base = OTHER; note = 2'-O-methylcytidine-3'-phosphate
  modified_base 13: mod_base = OTHER; note = 2'-O-methyladenosine-3'-phosphate
  modified_base 14: mod_base = OTHER; note = 2'-O-methyluridine-3'-phosphate
  modified_base 15: mod_base = OTHER; note = 2'-O-methylguanosine-3'-phosphate
  modified_base 16: mod_base = OTHER; note = 2'-O-methyluridine-3'-phosphate
  modified_base 17: mod_base = OTHER; note = 2'-O-methyluridine-3'-phosphate
  modified_base 18: mod_base = OTHER; note = 2'-O-methylguanosine-3'-phosphate
  modified_base 19: mod_base = OTHER; note = 2'-O-methylguanosine-3'-phosphate
  modified_base 20: mod_base = OTHER; note = 2'-O-methyladenosine-3'-phosphate
  modified_base 21: mod_base = OTHER; note = 2'-O-methyluridine-3'-phosphate ((2S,4R)-1-[29-[[2-(acetylamino)-2-deoxy-beta-D-galactopyra nosyl]oxy]-14,14-bis[[3-[[3-[[5-[[2-(acetylamino)-2-deoxy-b eta-D-galactopyranosyl]oxy]-1-oxopentyl]amino]propyl]amino] -3-oxopropoxy]methyl]-1,12,19,25-tetraoxo-16-oxa-13,20,24-t riazanonacos-1-yl]-4-hydroxy-2-pyrrolidinyl)methyl ester
atgaagagaggcatgttggat

SEQ ID NO: 636 - RNA, 21 nt, synthetic construct
  source 1..21: mol_type = other RNA
  modified_base 1: mod_base = OTHER; note = 2'-O-methyladenosine-3'-phosphorothioate
  modified_base 2: mod_base = OTHER; note = 2'-O-methyladenosine-3'-phosphorothioate
  modified_base 3: mod_base = OTHER; note = 2'-O-methylguanosine-3'-phosphate
  modified_base 4: mod_base = OTHER; note = 2'-O-methyladenosine-3'-phosphate
  modified_base 5: mod_base = OTHER; note = 2'-O-methylguanosine-3'-phosphate
  modified_base 6: mod_base = OTHER; note = 2'-O-methyladenosine-3'-phosphate
  modified_base 7: mod_base = OTHER; note = 2'-deoxy-2'-fluoroguanosine-3'-phosphate
  modified_base 8: mod_base = OTHER; note = 2'-O-methylguanosine-3'-phosphate
  modified_base 9: mod_base = OTHER; note = 2'-deoxy-2'-fluorocytidine-3'-phosphate
  modified_base 10: mod_base = OTHER; note = 2'-deoxy-2'-fluoroadenosine-3'-phosphate
  modified_base 11: mod_base = OTHER; note = 2'-deoxy-2'-fluorouridine-3'-phosphate
  modified_base 12: mod_base = OTHER; note = 2'-O-methylguanosine-3'-phosphate
  modified_base 13: mod_base = OTHER; note = 2'-O-methyluridine-3'-phosphate
  modified_base 14: mod_base = OTHER; note = 2'-O-methyluridine-3'-phosphate
  modified_base 15: mod_base = OTHER; note = 2'-O-methylguanosine-3'-phosphate
  modified_base 16: mod_base = OTHER; note = 2'-O-methylguanosine-3'-phosphate
  modified_base 17: mod_base = OTHER; note = 2'-O-methyladenosine-3'-phosphate
  modified_base 18: mod_base = OTHER; note = 2'-O-methylguanosine-3'-phosphate
  modified_base 19: mod_base = OTHER; note = 2'-O-methyladenosine-3'-phosphate
  modified_base 20: mod_base = OTHER; note = 2'-O-methylcytidine-3'-phosphate
  modified_base 21: mod_base = OTHER; note = 2'-O-methyluridine-3'-phosphate ((2S,4R)-1-[29-[[2-(acetylamino)-2-deoxy-beta-D-galactopyra nosyl]oxy]-14,14-bis[[3-[[3-[[5-[[2-(acetylamino)-2-deoxy-b eta-D-galactopyranosyl]oxy]-1-oxopentyl]amino]propyl]amino] -3-oxopropoxy]methyl]-1,12,19,25-tetraoxo-16-oxa-13,20,24-t riazanonacos-1-yl]-4-hydroxy-2-pyrrolidinyl)methyl ester
aagagaggcatgttggagact

SEQ ID NO: 637 - RNA, 21 nt, synthetic construct
  source 1..21: mol_type = other RNA
  modified_base 1: mod_base = OTHER; note = 2'-O-methylguanosine-3'-phosphorothioate
  modified_base 2: mod_base = OTHER; note = 2'-O-methyladenosine-3'-phosphorothioate
  modified_base 3: mod_base = OTHER; note = 2'-O-methyluridine-3'-phosphate
  modified_base 4: mod_base = OTHER; note = 2'-O-methylguanosine-3'-phosphate
  modified_base 5: mod_base = OTHER; note = 2'-O-methyladenosine-3'-phosphate
  modified_base 6: mod_base = OTHER; note = 2'-O-methylcytidine-3'-phosphate
  modified_base 7: mod_base = OTHER; note = 2'-deoxy-2'-fluorouridine-3'-phosphate
  modified_base 8: mod_base = OTHER; note = 2'-O-methyluridine-3'-phosphate
  modified_base 9: mod_base = OTHER; note = 2'-deoxy-2'-fluoroguanosine-3'-phosphate
  modified_base 10: mod_base = OTHER; note = 2'-deoxy-2'-fluoroguanosine-3'-phosphate
  modified_base 11: mod_base = OTHER; note = 2'-deoxy-2'-fluoroguanosine-3'-phosphate
  modified_base 12: mod_base = OTHER; note = 2'-O-methylcytidine-3'-phosphate
  modified_base 13: mod_base = OTHER; note = 2'-O-methyladenosine-3'-phosphate
  modified_base 14: mod_base = OTHER; note = 2'-O-methyladenosine-3'-phosphate
  modified_base 15: mod_base = OTHER; note = 2'-O-methyladenosine-3'-phosphate
  modified_base 16: mod_base = OTHER; note = 2'-O-methylguanosine-3'-phosphate
  modified_base 17: mod_base = OTHER; note = 2'-O-methylguanosine-3'-phosphate
  modified_base 18: mod_base = OTHER; note = 2'-O-methyluridine-3'-phosphate
  modified_base 19: mod_base = OTHER; note = 2'-O-methylguanosine-3'-phosphate
  modified_base 20: mod_base = OTHER; note = 2'-O-methylguanosine-3'-phosphate
  modified_base 21: mod_base = OTHER; note = 2'-O-methyladenosine-3'-phosphate ((2S,4R)-1-[29-[[2-(acetylamino)-2-deoxy-beta-D-galactopyra nosyl]oxy]-14,14-bis[[3-[[3-[[5-[[2-(acetylamino)-2-deoxy-b eta-D-galactopyranosyl]oxy]-1-oxopentyl]amino]propyl]amino] -3-oxopropoxy]methyl]-1,12,19,25-tetraoxo-16-oxa-13,20,24-t riazanonacos-1-yl]-4-hydroxy-2-pyrrolidinyl)methyl ester
gatgacttgggcaaaggtgga

SEQ ID NO: 638 - RNA, 21 nt, synthetic construct
  source 1..21: mol_type = other RNA
  modified_base 1: mod_base = OTHER; note = 2'-O-methylguanosine-3'-phosphorothioate
  modified_base 2: mod_base = OTHER; note = 2'-O-methyluridine-3'-phosphorothioate
  modified_base 3: mod_base = OTHER; note = 2'-O-methylguanosine-3'-phosphate
  modified_base 4: mod_base = OTHER; note = 2'-O-methylguanosine-3'-phosphate
  modified_base 5: mod_base = OTHER; note = 2'-O-methyluridine-3'-phosphate
  modified_base 6: mod_base = OTHER; note = 2'-O-methylcytidine-3'-phosphate
  modified_base 7: mod_base = OTHER; note = 2'-deoxy-2'-fluorocytidine-3'-phosphate
  modified_base 8: mod_base = OTHER; note = 2'-O-methyladenosine-3'-phosphate
  modified_base 9: mod_base = OTHER; note = 2'-deoxy-2'-fluorouridine-3'-phosphate
  modified_base 10: mod_base = OTHER; note = 2'-deoxy-2'-fluoroguanosine-3'-phosphate
  modified_base 11: mod_base = OTHER; note = 2'-deoxy-2'-fluoroadenosine-3'-phosphate
  modified_base 12: mod_base = OTHER; note = 2'-O-methyladenosine-3'-phosphate
  modified_base 13: mod_base = OTHER; note = 2'-O-methyladenosine-3'-phosphate
  modified_base 14: mod_base = OTHER; note = 2'-O-methyladenosine-3'-phosphate
  modified_base 15: mod_base = OTHER; note = 2'-O-methyladenosine-3'-phosphate
  modified_base 16: mod_base = OTHER; note = 2'-O-methylguanosine-3'-phosphate
  modified_base 17: mod_base = OTHER; note = 2'-O-methylcytidine-3'-phosphate
  modified_base 18: mod_base = OTHER; note = 2'-O-methyladenosine-3'-phosphate
  modified_base 19: mod_base = OTHER; note = 2'-O-methylguanosine-3'-phosphate
  modified_base 20: mod_base = OTHER; note = 2'-O-methyladenosine-3'-phosphate
  modified_base 21: mod_base = OTHER; note = 2'-O-methyluridine-3'-phosphate ((2S,4R)-1-[29-[[2-(acetylamino)-2-deoxy-beta-D-galactopyra nosyl]oxy]-14,14-bis[[3-[[3-[[5-[[2-(acetylamino)-2-deoxy-b eta-D-galactopyranosyl]oxy]-1-oxopentyl]amino]propyl]amino] -3-oxopropoxy]methyl]-1,12,19,25-tetraoxo-16-oxa-13,20,24-t riazanonacos-1-yl]-4-hydroxy-2-pyrrolidinyl)methyl ester
gtggtccatgaaaaagcagat

SEQ ID NO: 639 - RNA, 21 nt, synthetic construct
  source 1..21: mol_type = other RNA
  modified_base 1: mod_base = OTHER; note = 2'-O-methyluridine-3'-phosphorothioate
  modified_base 2: mod_base = OTHER; note = 2'-O-methylguanosine-3'-phosphorothioate
  modified_base 3: mod_base = OTHER; note = 2'-O-methylguanosine-3'-phosphate
  modified_base 4: mod_base = OTHER; note = 2'-O-methyluridine-3'-phosphate
  modified_base 5: mod_base = OTHER; note = 2'-O-methylcytidine-3'-phosphate
  modified_base 6: mod_base = OTHER; note = 2'-O-methylcytidine-3'-phosphate
  modified_base 7: mod_base = OTHER; note = 2'-deoxy-2'-fluoroadenosine-3'-phosphate
  modified_base 8: mod_base = OTHER; note = 2'-O-methyluridine-3'-phosphate
  modified_base 9: mod_base = OTHER; note = 2'-deoxy-2'-fluoroguanosine-3'-phosphate
  modified_base 10: mod_base = OTHER; note = 2'-deoxy-2'-fluoroadenosine-3'-phosphate
  modified_base 11: mod_base = OTHER; note = 2'-deoxy-2'-fluoroadenosine-3'-phosphate
  modified_base 12: mod_base = OTHER; note = 2'-O-methyladenosine-3'-phosphate
  modified_base 13: mod_base = OTHER; note = 2'-O-methyladenosine-3'-phosphate
  modified_base 14: mod_base = OTHER; note = 2'-O-methyladenosine-3'-phosphate
  modified_base 15: mod_base = OTHER; note = 2'-O-methylguanosine-3'-phosphate
  modified_base 16: mod_base = OTHER; note = 2'-O-methylcytidine-3'-phosphate
  modified_base 17: mod_base = OTHER; note = 2'-O-methyladenosine-3'-phosphate
  modified_base 18: mod_base = OTHER; note = 2'-O-methylguanosine-3'-phosphate
  modified_base 19: mod_base = OTHER; note = 2'-O-methyladenosine-3'-phosphate
  modified_base 20: mod_base = OTHER; note = 2'-O-methyluridine-3'-phosphate
  modified_base 21: mod_base = OTHER; note = 2'-O-methyluridine-3'-phosphate ((2S,4R)-1-[29-[[2-(acetylamino)-2-deoxy-beta-D-galactopyra nosyl]oxy]-14,14-bis[[3-[[3-[[5-[[2-(acetylamino)-2-deoxy-b eta-D-galactopyranosyl]oxy]-1-oxopentyl]amino]propyl]amino] -3-oxopropoxy]methyl]-1,12,19,25-tetraoxo-16-oxa-13,20,24-t riazanonacos-1-yl]-4-hydroxy-2-pyrrolidinyl)methyl ester
tggtccatgaaaaagcagatt

SEQ ID NO: 640 - RNA, 21 nt, synthetic construct
  source 1..21: mol_type = other RNA
  modified_base 1: mod_base = OTHER; note = 2'-O-methylguanosine-3'-phosphorothioate
  modified_base 2: mod_base = OTHER; note = 2'-O-methylguanosine-3'-phosphorothioate
  modified_base 3: mod_base = OTHER; note = 2'-O-methyluridine-3'-phosphate
  modified_base 4: mod_base = OTHER; note = 2'-O-methylcytidine-3'-phosphate
  modified_base 5: mod_base = OTHER; note = 2'-O-methylcytidine-3'-phosphate
  modified_base 6: mod_base = OTHER; note = 2'-O-methyladenosine-3'-phosphate
  modified_base 7: mod_base = OTHER; note = 2'-deoxy-2'-fluorouridine-3'-phosphate
  modified_base 8: mod_base = OTHER; note = 2'-O-methylguanosine-3'-phosphate
  modified_base 9: mod_base = OTHER; note = 2'-deoxy-2'-fluoroadenosine-3'-phosphate
  modified_base 10: mod_base = OTHER; note = 2'-deoxy-2'-fluoroadenosine-3'-phosphate
  modified_base 11: mod_base = OTHER; note = 2'-deoxy-2'-fluoroadenosine-3'-phosphate
  modified_base 12: mod_base = OTHER; note = 2'-O-methyladenosine-3'-phosphate
  modified_base 13: mod_base = OTHER; note = 2'-O-methyladenosine-3'-phosphate
  modified_base 14: mod_base = OTHER; note = 2'-O-methylguanosine-3'-phosphate
  modified_base 15: mod_base = OTHER; note = 2'-O-methylcytidine-3'-phosphate
  modified_base 16: mod_base = OTHER; note = 2'-O-methyladenosine-3'-phosphate
  modified_base 17: mod_base = OTHER; note = 2'-O-methylguanosine-3'-phosphate
  modified_base 18: mod_base = OTHER; note = 2'-O-methyladenosine-3'-phosphate
  modified_base 19: mod_base = OTHER; note = 2'-O-methyluridine-3'-phosphate
  modified_base 20: mod_base = OTHER; note = 2'-O-methylguanosine-3'-phosphate
  modified_base 21: mod_base = OTHER; note = 2'-O-methyladenosine-3'-phosphate ((2S,4R)-1-[29-[[2-(acetylamino)-2-deoxy-beta-D-galactopyra nosyl]oxy]-14,14-bis[[3-[[3-[[5-[[2-(acetylamino)-2-deoxy-b eta-D-galactopyranosyl]oxy]-1-oxopentyl]amino]propyl]amino] -3-oxopropoxy]methyl]-1,12,19,25-tetraoxo-16-oxa-13,20,24-t riazanonacos-1-yl]-4-hydroxy-2-pyrrolidinyl)methyl ester
ggtccatgaaaaagcagatga

SEQ ID NO: 641 - RNA, 21 nt, synthetic construct
  source 1..21: mol_type = other RNA
  modified_base 1: mod_base = OTHER; note = 2'-O-methylguanosine-3'-phosphorothioate
  modified_base 2: mod_base = OTHER; note = 2'-O-methylcytidine-3'-phosphorothioate
  modified_base 3: mod_base = OTHER; note = 2'-O-methyladenosine-3'-phosphate
  modified_base 4: mod_base = OTHER; note = 2'-O-methylguanosine-3'-phosphate
  modified_base 5: mod_base = OTHER; note = 2'-O-methyladenosine-3'-phosphate
  modified_base 6: mod_base = OTHER; note = 2'-O-methyluridine-3'-phosphate
  modified_base 7: mod_base = OTHER; note = 2'-deoxy-2'-fluoroguanosine-3'-phosphate
  modified_base 8: mod_base = OTHER; note = 2'-O-methyladenosine-3'-phosphate
  modified_base 9: mod_base = OTHER; note = 2'-deoxy-2'-fluorocytidine-3'-phosphate
  modified_base 10: mod_base = OTHER; note = 2'-deoxy-2'-fluorouridine-3'-phosphate
  modified_base 11: mod_base = OTHER; note = 2'-deoxy-2'-fluorouridine-3'-phosphate
  modified_base 12: mod_base = OTHER; note = 2'-O-methylguanosine-3'-phosphate
  modified_base 13: mod_base = OTHER; note = 2'-O-methylguanosine-3'-phosphate
  modified_base 14: mod_base = OTHER; note = 2'-O-methylguanosine-3'-phosphate
  modified_base 15: mod_base = OTHER; note = 2'-O-methylcytidine-3'-phosphate
  modified_base 16: mod_base = OTHER; note = 2'-O-methyladenosine-3'-phosphate
  modified_base 17: mod_base = OTHER; note = 2'-O-methyladenosine-3'-phosphate
  modified_base 18: mod_base = OTHER; note = 2'-O-methyladenosine-3'-phosphate
  modified_base 19: mod_base = OTHER; note = 2'-O-methylguanosine-3'-phosphate
  modified_base 20: mod_base = OTHER; note = 2'-O-methylguanosine-3'-phosphate
  modified_base 21: mod_base = OTHER; note = 2'-O-methyluridine-3'-phosphate ((2S,4R)-1-[29-[[2-(acetylamino)-2-deoxy-beta-D-galactopyra nosyl]oxy]-14,14-bis[[3-[[3-[[5-[[2-(acetylamino)-2-deoxy-b eta-D-galactopyranosyl]oxy]-1-oxopentyl]amino]propyl]amino] -3-oxopropoxy]methyl]-1,12,19,25-tetraoxo-16-oxa-13,20,24-t riazanonacos-1-yl]-4-hydroxy-2-pyrrolidinyl)methyl ester
gcagatgacttgggcaaaggt

SEQ ID NO: 642 - RNA, 21 nt, synthetic construct
  source 1..21: mol_type = other RNA
  modified_base 1: mod_base = OTHER; note = 2'-O-methyladenosine-3'-phosphorothioate
  modified_base 2: mod_base = OTHER; note = 2'-O-methylguanosine-3'-phosphorothioate
  modified_base 3: mod_base = OTHER; note = 2'-O-methyladenosine-3'-phosphate
  modified_base 4: mod_base = OTHER; note = 2'-O-methyluridine-3'-phosphate
  modified_base 5: mod_base = OTHER; note = 2'-O-methylguanosine-3'-phosphate
  modified_base 6: mod_base = OTHER; note = 2'-O-methyladenosine-3'-phosphate
  modified_base 7: mod_base = OTHER; note = 2'-deoxy-2'-fluorocytidine-3'-phosphate
  modified_base 8: mod_base = OTHER; note = 2'-O-methyluridine-3'-phosphate
  modified_base 9: mod_base = OTHER; note = 2'-deoxy-2'-fluorouridine-3'-phosphate
  modified_base 10: mod_base = OTHER; note = 2'-deoxy-2'-fluoroguanosine-3'-phosphate
  modified_base 11: mod_base = OTHER; note = 2'-deoxy-2'-fluoroguanosine-3'-phosphate
  modified_base 12: mod_base = OTHER; note = 2'-O-methylguanosine-3'-phosphate
  modified_base 13: mod_base = OTHER; note = 2'-O-methylcytidine-3'-phosphate
  modified_base 14: mod_base = OTHER; note = 2'-O-methyladenosine-3'-phosphate
  modified_base 15: mod_base = OTHER; note = 2'-O-methyladenosine-3'-phosphate
  modified_base 16: mod_base = OTHER; note = 2'-O-methyladenosine-3'-phosphate
  modified_base 17: mod_base = OTHER; note = 2'-O-methylguanosine-3'-phosphate
  modified_base 18: mod_base = OTHER; note = 2'-O-methylguanosine-3'-phosphate
  modified_base 19: mod_base = OTHER; note = 2'-O-methyluridine-3'-phosphate
  modified_base 20: mod_base = OTHER; note = 2'-O-methylguanosine-3'-phosphate
  modified_base 21: mod_base = OTHER; note = 2'-O-methyluridine-3'-phosphate ((2S,4R)-1-[29-[[2-(acetylamino)-2-deoxy-beta-D-galactopyra nosyl]oxy]-14,14-bis[[3-[[3-[[5-[[2-(acetylamino)-2-deoxy-b eta-D-galactopyranosyl]oxy]-1-oxopentyl]amino]propyl]amino] -3-oxopropoxy]methyl]-1,12,19,25-tetraoxo-16-oxa-13,20,24-t riazanonacos-1-yl]-4-hydroxy-2-pyrrolidinyl)methyl ester
agatgacttgggcaaaggtgt

SEQ ID NO: 643 - RNA, 21 nt, synthetic construct
  source 1..21: mol_type = other RNA
  modified_base 1: mod_base = OTHER; note = 2'-O-methyladenosine-3'-phosphorothioate
  modified_base 2: mod_base = OTHER; note = 2'-O-methylcytidine-3'-phosphorothioate
  modified_base 3: mod_base = OTHER; note = 2'-O-methyluridine-3'-phosphate
  modified_base 4: mod_base = OTHER; note = 2'-O-methyluridine-3'-phosphate
  modified_base 5: mod_base = OTHER; note = 2'-O-methylguanosine-3'-phosphate
  modified_base 6: mod_base = OTHER; note = 2'-O-methylguanosine-3'-phosphate
  modified_base 7: mod_base = OTHER; note = 2'-deoxy-2'-fluoroguanosine-3'-phosphate
  modified_base 8: mod_base = OTHER; note = 2'-O-methylcytidine-3'-phosphate
  modified_base 9: mod_base = OTHER; note = 2'-deoxy-2'-fluoroadenosine-3'-phosphate
  modified_base 10: mod_base = OTHER; note = 2'-deoxy-2'-fluoroadenosine-3'-phosphate
  modified_base 11: mod_base = OTHER; note = 2'-deoxy-2'-fluoroadenosine-3'-phosphate
  modified_base 12: mod_base = OTHER; note = 2'-O-methylguanosine-3'-phosphate
  modified_base 13: mod_base = OTHER; note = 2'-O-methylguanosine-3'-phosphate
  modified_base 14: mod_base = OTHER; note = 2'-O-methyluridine-3'-phosphate
  modified_base 15: mod_base = OTHER; note = 2'-O-methylguanosine-3'-phosphate
  modified_base 16: mod_base = OTHER; note = 2'-O-methylguanosine-3'-phosphate
  modified_base 17: mod_base = OTHER; note = 2'-O-methyladenosine-3'-phosphate
  modified_base 18: mod_base = OTHER; note = 2'-O-methyladenosine-3'-phosphate
  modified_base 19: mod_base = OTHER; note = 2'-O-methyladenosine-3'-phosphate
  modified_base 20: mod_base = OTHER; note = 2'-O-methyluridine-3'-phosphate
  modified_base 21: mod_base = OTHER; note = 2'-O-methyluridine-3'-phosphate ((2S,4R)-1-[29-[[2-(acetylamino)-2-deoxy-beta-D-galactopyra nosyl]oxy]-14,14-bis[[3-[[3-[[5-[[2-(acetylamino)-2-deoxy-b eta-D-galactopyranosyl]oxy]-1-oxopentyl]amino]propyl]amino] -3-oxopropoxy]methyl]-1,12,19,25-tetraoxo-16-oxa-13,20,24-t riazanonacos-1-yl]-4-hydroxy-2-pyrrolidinyl)methyl ester
acttgggcaaaggtggaaatt

SEQ ID NO: 644 - RNA, 21 nt, synthetic construct
  source 1..21: mol_type = other RNA
  modified_base 1: mod_base = OTHER; note = 2'-O-methylguanosine-3'-phosphorothioate
  modified_base 2: mod_base = OTHER; note = 2'-O-methylcytidine-3'-phosphorothioate
  modified_base 3: mod_base = OTHER; note = 2'-O-methyluridine-3'-phosphate
  modified_base 4: mod_base = OTHER; note = 2'-O-methyluridine-3'-phosphate
  modified_base 5: mod_base = OTHER; note = 2'-O-methylguanosine-3'-phosphate
  modified_base 6: mod_base = OTHER; note = 2'-O-methyluridine-3'-phosphate
  modified_base 7: mod_base = OTHER; note = 2'-deoxy-2'-fluoroguanosine-3'-phosphate
  modified_base 8: mod_base = OTHER; note = 2'-O-methylguanosine-3'-phosphate
  modified_base 9: mod_base = OTHER; note = 2'-deoxy-2'-fluorouridine-3'-phosphate
  modified_base 10: mod_base = OTHER; note = 2'-deoxy-2'-fluoroguanosine-3'-phosphate
  modified_base 11: mod_base = OTHER; note = 2'-deoxy-2'-fluorouridine-3'-phosphate
  modified_base 12: mod_base = OTHER; note = 2'-O-methyladenosine-3'-phosphate
  modified_base 13: mod_base = OTHER; note = 2'-O-methyladenosine-3'-phosphate
  modified_base 14: mod_base = OTHER; note = 2'-O-methyluridine-3'-phosphate
  modified_base 15: mod_base = OTHER; note = 2'-O-methyluridine-3'-phosphate
  modified_base 16: mod_base = OTHER; note = 2'-O-methylguanosine-3'-phosphate
  modified_base 17: mod_base = OTHER; note = 2'-O-methylguanosine-3'-phosphate
  modified_base 18: mod_base = OTHER; note = 2'-O-methylguanosine-3'-phosphate
  modified_base 19: mod_base = OTHER; note = 2'-O-methyladenosine-3'-phosphate
  modified_base 20: mod_base = OTHER; note = 2'-O-methyluridine-3'-phosphate
  modified_base 21: mod_base = OTHER; note = 2'-O-methyluridine-3'-phosphate ((2S,4R)-1-[29-[[2-(acetylamino)-2-deoxy-beta-D-galactopyra nosyl]oxy]-14,14-bis[[3-[[3-[[5-[[2-(acetylamino)-2-deoxy-b eta-D-galactopyranosyl]oxy]-1-oxopentyl]amino]propyl]amino] -3-oxopropoxy]methyl]-1,12,19,25-tetraoxo-16-oxa-13,20,24-t riazanonacos-1-yl]-4-hydroxy-2-pyrrolidinyl)methyl ester
gcttgtggtgtaattgggatt

SEQ ID NO: 645 - RNA, 21 nt, synthetic construct
  source 1..21: mol_type = other RNA
  modified_base 1: mod_base = OTHER; note = 2'-O-methylcytidine-3'-phosphorothioate
  modified_base 2: mod_base = OTHER; note = 2'-O-methyluridine-3'-phosphorothioate
  modified_base 3: mod_base = OTHER; note = 2'-O-methyluridine-3'-phosphate
  modified_base 4: mod_base = OTHER; note = 2'-O-methylguanosine-3'-phosphate
  modified_base 5: mod_base = OTHER; note = 2'-O-methyluridine-3'-phosphate
  modified_base 6: mod_base = OTHER; note = 2'-O-methylguanosine-3'-phosphate
  modified_base 7: mod_base = OTHER; note = 2'-deoxy-2'-fluoroguanosine-3'-phosphate
  modified_base 8: mod_base = OTHER; note = 2'-O-methyluridine-3'-phosphate
  modified_base 9: mod_base = OTHER; note = 2'-deoxy-2'-fluoroguanosine-3'-phosphate
  modified_base 10: mod_base = OTHER; note = 2'-deoxy-2'-fluorouridine-3'-phosphate
  modified_base 11: mod_base = OTHER; note = 2'-deoxy-2'-fluoroadenosine-3'-phosphate
  modified_base 12: mod_base = OTHER; note = 2'-O-methyladenosine-3'-phosphate
  modified_base 13: mod_base = OTHER; note = 2'-O-methyluridine-3'-phosphate
  modified_base 14: mod_base = OTHER; note = 2'-O-methyluridine-3'-phosphate
  modified_base 15: mod_base = OTHER; note = 2'-O-methylguanosine-3'-phosphate
  modified_base 16: mod_base = OTHER; note = 2'-O-methylguanosine-3'-phosphate
  modified_base 17: mod_base = OTHER; note = 2'-O-methylguanosine-3'-phosphate
  modified_base 18: mod_base = OTHER; note = 2'-O-methyladenosine-3'-phosphate
  modified_base 19: mod_base = OTHER; note = 2'-O-methyluridine-3'-phosphate
  modified_base 20: mod_base = OTHER; note = 2'-O-methylcytidine-3'-phosphate
  modified_base 21: mod_base = OTHER; note = 2'-O-methyluridine-3'-phosphate ((2S,4R)-1-[29-[[2-(acetylamino)-2-deoxy-beta-D-galactopyra nosyl]oxy]-14,14-bis[[3-[[3-[[5-[[2-(acetylamino)-2-deoxy-b eta-D-galactopyranosyl]oxy]-1-oxopentyl]amino]propyl]amino] -3-oxopropoxy]methyl]-1,12,19,25-tetraoxo-16-oxa-13,20,24-t riazanonacos-1-yl]-4-hydroxy-2-pyrrolidinyl)methyl ester
cttgtggtgtaattgggatct

SEQ ID NO: 646 - RNA, 21 nt, synthetic construct
  source 1..21: mol_type = other RNA
  modified_base 1: mod_base = OTHER; note = 2'-O-methyluridine-3'-phosphorothioate
  modified_base 2: mod_base = OTHER; note = 2'-O-methyluridine-3'-phosphorothioate
  modified_base 3: mod_base = OTHER; note = 2'-O-methylguanosine-3'-phosphate
  modified_base 4: mod_base = OTHER; note = 2'-O-methyluridine-3'-phosphate
  modified_base 5: mod_base = OTHER; note = 2'-O-methylguanosine-3'-phosphate
  modified_base 6: mod_base = OTHER; note = 2'-O-methylguanosine-3'-phosphate
  modified_base 7: mod_base = OTHER; note = 2'-deoxy-2'-fluorouridine-3'-phosphate
  modified_base 8: mod_base = OTHER; note = 2'-O-methylguanosine-3'-phosphate
  modified_base 9: mod_base = OTHER; note = 2'-deoxy-2'-fluorouridine-3'-phosphate
  modified_base 10: mod_base = OTHER; note = 2'-deoxy-2'-fluoroadenosine-3'-phosphate
  modified_base 11: mod_base = OTHER; note = 2'-deoxy-2'-fluoroadenosine-3'-phosphate
  modified_base 12: mod_base = OTHER; note = 2'-O-methyluridine-3'-phosphate
  modified_base 13: mod_base = OTHER; note = 2'-O-methyluridine-3'-phosphate
  modified_base 14: mod_base = OTHER; note = 2'-O-methylguanosine-3'-phosphate
  modified_base 15: mod_base = OTHER; note = 2'-O-methylguanosine-3'-phosphate
  modified_base 16: mod_base = OTHER; note = 2'-O-methylguanosine-3'-phosphate
  modified_base 17: mod_base = OTHER; note = 2'-O-methyladenosine-3'-phosphate
  modified_base 18: mod_base = OTHER; note = 2'-O-methyluridine-3'-phosphate
  modified_base 19: mod_base = OTHER; note = 2'-O-methylcytidine-3'-phosphate
  modified_base 20: mod_base = OTHER; note = 2'-O-methylguanosine-3'-phosphate
  modified_base 21: mod_base = OTHER; note = 2'-O-methyluridine-3'-phosphate ((2S,4R)-1-[29-[[2-(acetylamino)-2-deoxy-beta-D-galactopyra nosyl]oxy]-14,14-bis[[3-[[3-[[5-[[2-(acetylamino)-2-deoxy-b eta-D-galactopyranosyl]oxy]-1-oxopentyl]amino]propyl]amino] -3-oxopropoxy]methyl]-1,12,19,25-tetraoxo-16-oxa-13,20,24-t riazanonacos-1-yl]-4-hydroxy-2-pyrrolidinyl)methyl ester
ttgtggtgtaattgggatcgt

SEQ ID NO: 647 - RNA, 21 nt, synthetic construct
  source 1..21: mol_type = other RNA
  modified_base 1: mod_base = OTHER; note = 2'-O-methyluridine-3'-phosphorothioate
  modified_base 2: mod_base = OTHER; note = 2'-O-methylguanosine-3'-phosphorothioate
  modified_base 3: mod_base = OTHER; note = 2'-O-methyluridine-3'-phosphate
  modified_base 4: mod_base = OTHER; note = 2'-O-methylguanosine-3'-phosphate
  modified_base 5: mod_base = OTHER; note = 2'-O-methylguanosine-3'-phosphate
  modified_base 6: mod_base = OTHER; note = 2'-O-methyluridine-3'-phosphate
  modified_base 7: mod_base = OTHER; note = 2'-deoxy-2'-fluoroguanosine-3'-phosphate
  modified_base 8: mod_base = OTHER; note = 2'-O-methyluridine-3'-phosphate
  modified_base 9: mod_base = OTHER; note = 2'-deoxy-2'-fluoroadenosine-3'-phosphate
  modified_base 10: mod_base = OTHER; note = 2'-deoxy-2'-fluoroadenosine-3'-phosphate
  modified_base 11: mod_base = OTHER; note = 2'-deoxy-2'-fluorouridine-3'-phosphate
  modified_base 12: mod_base = OTHER; note = 2'-O-methyluridine-3'-phosphate
  modified_base 13: mod_base = OTHER; note = 2'-O-methylguanosine-3'-phosphate
  modified_base 14: mod_base = OTHER; note = 2'-O-methylguanosine-3'-phosphate
  modified_base 15: mod_base = OTHER; note = 2'-O-methylguanosine-3'-phosphate
  modified_base 16: mod_base = OTHER; note = 2'-O-methyladenosine-3'-phosphate
  modified_base 17: mod_base = OTHER; note = 2'-O-methyluridine-3'-phosphate
  modified_base 18: mod_base = OTHER; note = 2'-O-methylcytidine-3'-phosphate
  modified_base 19: mod_base = OTHER; note = 2'-O-methylguanosine-3'-phosphate
  modified_base 20: mod_base = OTHER; note = 2'-O-methylcytidine-3'-phosphate
  modified_base 21: mod_base = OTHER; note = 2'-O-methyluridine-3'-phosphate ((2S,4R)-1-[29-[[2-(acetylamino)-2-deoxy-beta-D-galactopyra nosyl]oxy]-14,14-bis[[3-[[3-[[5-[[2-(acetylamino)-2-deoxy-b eta-D-galactopyranosyl]oxy]-1-oxopentyl]amino]propyl]amino] -3-oxopropoxy]methyl]-1,12,19,25-tetraoxo-16-oxa-13,20,24-t riazanonacos-1-yl]-4-hydroxy-2-pyrrolidinyl)methyl ester
tgtggtgtaattgggatcgct

SEQ ID NO: 648 - RNA, 21 nt, synthetic construct
  source 1..21: mol_type = other RNA
  modified_base 1: mod_base = OTHER; note = 2'-O-methylguanosine-3'-phosphorothioate
  modified_base 2: mod_base = OTHER; note = 2'-O-methyluridine-3'-phosphorothioate
  modified_base 3: mod_base = OTHER; note = 2'-O-methylguanosine-3'-phosphate
  modified_base 4: mod_base = OTHER; note = 2'-O-methylguanosine-3'-phosphate
  modified_base 5: mod_base = OTHER; note = 2'-O-methyluridine-3'-phosphate
  modified_base 6: mod_base = OTHER; note = 2'-O-methylguanosine-3'-phosphate
  modified_base 7: mod_base = OTHER; note = 2'-deoxy-2'-fluorouridine-3'-phosphate
  modified_base 8: mod_base = OTHER; note = 2'-O-methyladenosine-3'-phosphate
  modified_base 9: mod_base = OTHER; note = 2'-deoxy-2'-fluoroadenosine-3'-phosphate
  modified_base 10: mod_base = OTHER; note = 2'-deoxy-2'-fluorouridine-3'-phosphate
  modified_base 11: mod_base = OTHER; note = 2'-deoxy-2'-fluorouridine-3'-phosphate
  modified_base 12: mod_base = OTHER; note = 2'-O-methylguanosine-3'-phosphate
  modified_base 13: mod_base = OTHER; note = 2'-O-methylguanosine-3'-phosphate
  modified_base 14: mod_base = OTHER; note = 2'-O-methylguanosine-3'-phosphate
  modified_base 15: mod_base = OTHER; note = 2'-O-methyladenosine-3'-phosphate
  modified_base 16: mod_base = OTHER; note = 2'-O-methyluridine-3'-phosphate
  modified_base 17: mod_base = OTHER; note = 2'-O-methylcytidine-3'-phosphate
  modified_base 18: mod_base = OTHER; note = 2'-O-methylguanosine-3'-phosphate
  modified_base 19: mod_base = OTHER; note = 2'-O-methylcytidine-3'-phosphate
  modified_base 20: mod_base = OTHER; note = 2'-O-methylcytidine-3'-phosphate
  modified_base 21: mod_base = OTHER; note = 2'-O-methyluridine-3'-phosphate ((2S,4R)-1-[29-[[2-(acetylamino)-2-deoxy-beta-D-galactopyra nosyl]oxy]-14,14-bis[[3-[[3-[[5-[[2-(acetylamino)-2-deoxy-b eta-D-galactopyranosyl]oxy]-1-oxopentyl]amino]propyl]amino] -3-oxopropoxy]methyl]-1,12,19,25-tetraoxo-16-oxa-13,20,24-t riazanonacos-1-yl]-4-hydroxy-2-pyrrolidinyl)methyl ester
gtggtgtaattgggatcgcct

SEQ ID NO: 649 - RNA, 21 nt, synthetic construct
  source 1..21: mol_type = other RNA
  modified_base 1: mod_base = OTHER; note = 2'-O-methyluridine-3'-phosphorothioate
  modified_base 2: mod_base = OTHER; note = 2'-O-methylguanosine-3'-phosphorothioate
  modified_base 3: mod_base = OTHER; note = 2'-O-methylcytidine-3'-phosphate
  modified_base 4: mod_base = OTHER; note = 2'-O-methyladenosine-3'-phosphate
  modified_base 5: mod_base = OTHER; note = 2'-O-methylguanosine-3'-phosphate
  modified_base 6: mod_base = OTHER; note = 2'-O-methylguanosine-3'-phosphate
  modified_base 7: mod_base = OTHER; note = 2'-deoxy-2'-fluoroguanosine-3'-phosphate
  modified_base 8: mod_base = OTHER; note = 2'-O-methylcytidine-3'-phosphate
  modified_base 9: mod_base = OTHER; note = 2'-deoxy-2'-fluoroadenosine-3'-phosphate
  modified_base 10: mod_base = OTHER; note = 2'-deoxy-2'-fluorouridine-3'-phosphate
  modified_base 11: mod_base = OTHER; note = 2'-deoxy-2'-fluorocytidine-3'-phosphate
  modified_base 12: mod_base = OTHER; note = 2'-O-methyladenosine-3'-phosphate
  modified_base 13: mod_base = OTHER; note = 2'-O-methyluridine-3'-phosphate
  modified_base 14: mod_base = OTHER; note = 2'-O-methylcytidine-3'-phosphate
  modified_base 15: mod_base = OTHER; note = 2'-O-methyladenosine-3'-phosphate
  modified_base 16: mod_base = OTHER; note = 2'-O-methyladenosine-3'-phosphate
  modified_base 17: mod_base = OTHER; note = 2'-O-methyluridine-3'-phosphate
  modified_base 18: mod_base = OTHER; note = 2'-O-methyluridine-3'-phosphate
  modified_base 19: mod_base = OTHER; note = 2'-O-methyluridine-3'-phosphate
  modified_base 20: mod_base = OTHER; note = 2'-O-methylcytidine-3'-phosphate
  modified_base 21: mod_base = OTHER; note = 2'-O-methyluridine-3'-phosphate ((2S,4R)-1-[29-[[2-(acetylamino)-2-deoxy-beta-D-galactopyra nosyl]oxy]-14,14-bis[[3-[[3-[[5-[[2-(acetylamino)-2-deoxy-b eta-D-galactopyranosyl]oxy]-1-oxopentyl]amino]propyl]amino] -3-oxopropoxy]methyl]-1,12,19,25-tetraoxo-16-oxa-13,20,24-t riazanonacos-1-yl]-4-hydroxy-2-pyrrolidinyl)methyl ester
tgcagggcatcatcaatttct

SEQ ID NO: 650 - RNA, 21 nt, synthetic construct
  source 1..21: mol_type = other RNA
  modified_base 1: mod_base = OTHER; note = 2'-O-methylguanosine-3'-phosphorothioate
  modified_base 2: mod_base = OTHER; note = 2'-O-methylcytidine-3'-phosphorothioate
  modified_base 3: mod_base = OTHER; note = 2'-O-methyladenosine-3'-phosphate
  modified_base 4: mod_base = OTHER; note = 2'-O-methylguanosine-3'-phosphate
  modified_base 5: mod_base = OTHER; note = 2'-O-methylguanosine-3'-phosphate
  modified_base 6: mod_base = OTHER; note = 2'-O-methylguanosine-3'-phosphate
  modified_base 7: mod_base = OTHER; note = 2'-deoxy-2'-fluorocytidine-3'-phosphate
  modified_base 8: mod_base = OTHER; note = 2'-O-methyladenosine-3'-phosphate
  modified_base 9: mod_base = OTHER; note = 2'-deoxy-2'-fluorouridine-3'-phosphate
  modified_base 10: mod_base = OTHER; note = 2'-deoxy-2'-fluorocytidine-3'-phosphate
  modified_base 11: mod_base = OTHER; note = 2'-deoxy-2'-fluoroadenosine-3'-phosphate
  modified_base 12: mod_base = OTHER; note = 2'-O-methyluridine-3'-phosphate
  modified_base 13: mod_base = OTHER; note = 2'-O-methylcytidine-3'-phosphate
  modified_base 14: mod_base = OTHER; note = 2'-O-methyladenosine-3'-phosphate
  modified_base 15: mod_base = OTHER; note = 2'-O-methyladenosine-3'-phosphate
  modified_base 16: mod_base = OTHER; note = 2'-O-methyluridine-3'-phosphate
  modified_base 17: mod_base = OTHER; note = 2'-O-methyluridine-3'-phosphate
  modified_base 18: mod_base = OTHER; note = 2'-O-methyluridine-3'-phosphate
  modified_base 19: mod_base = OTHER; note = 2'-O-methylcytidine-3'-phosphate
  modified_base 20: mod_base = OTHER; note = 2'-O-methylguanosine-3'-phosphate
  modified_base 21: mod_base = OTHER; note = 2'-O-methyladenosine-3'-phosphate ((2S,4R)-1-[29-[[2-(acetylamino)-2-deoxy-beta-D-galactopyra nosyl]oxy]-14,14-bis[[3-[[3-[[5-[[2-(acetylamino)-2-deoxy-b eta-D-galactopyranosyl]oxy]-1-oxopentyl]amino]propyl]amino] -3-oxopropoxy]methyl]-1,12,19,25-tetraoxo-16-oxa-13,20,24-t riazanonacos-1-yl]-4-hydroxy-2-pyrrolidinyl)methyl ester
gcagggcatcatcaatttcga

SEQ ID NO: 651 - RNA, 21 nt, synthetic construct
  source 1..21: mol_type = other RNA
  modified_base 1: mod_base = OTHER; note = 2'-O-methylcytidine-3'-phosphorothioate
  modified_base 2: mod_base = OTHER; note = 2'-O-methyladenosine-3'-phosphorothioate
  modified_base 3: mod_base = OTHER; note = 2'-O-methylguanosine-3'-phosphate
  modified_base 4: mod_base = OTHER; note = 2'-O-methylguanosine-3'-phosphate
  modified_base 5: mod_base = OTHER; note = 2'-O-methylguanosine-3'-phosphate
  modified_base 6: mod_base = OTHER; note = 2'-O-methylcytidine-3'-phosphate
  modified_base 7: mod_base = OTHER; note = 2'-deoxy-2'-fluoroadenosine-3'-phosphate
  modified_base 8: mod_base = OTHER; note = 2'-O-methyluridine-3'-phosphate
  modified_base 9: mod_base = OTHER; note = 2'-deoxy-2'-fluorocytidine-3'-phosphate
  modified_base 10: mod_base = OTHER; note = 2'-deoxy-2'-fluoroadenosine-3'-phosphate
  modified_base 11: mod_base = OTHER; note = 2'-deoxy-2'-fluorouridine-3'-phosphate
  modified_base 12: mod_base = OTHER; note = 2'-O-methylcytidine-3'-phosphate
  modified_base 13: mod_base = OTHER; note = 2'-O-methyladenosine-3'-phosphate
  modified_base 14: mod_base = OTHER; note = 2'-O-methyladenosine-3'-phosphate
  modified_base 15: mod_base = OTHER; note = 2'-O-methyluridine-3'-phosphate
  modified_base 16: mod_base = OTHER; note = 2'-O-methyluridine-3'-phosphate
  modified_base 17: mod_base = OTHER; note = 2'-O-methyluridine-3'-phosphate
  modified_base 18: mod_base = OTHER; note = 2'-O-methylcytidine-3'-phosphate
  modified_base 19: mod_base = OTHER; note = 2'-O-methylguanosine-3'-phosphate
  modified_base 20: mod_base = OTHER; note = 2'-O-methyladenosine-3'-phosphate
  modified_base 21: mod_base = OTHER; note = 2'-O-methyluridine-3'-phosphate ((2S,4R)-1-[29-[[2-(acetylamino)-2-deoxy-beta-D-galactopyra nosyl]oxy]-14,14-bis[[3-[[3-[[5-[[2-(acetylamino)-2-deoxy-b eta-D-galactopyranosyl]oxy]-1-oxopentyl]amino]propyl]amino] -3-oxopropoxy]methyl]-1,12,19,25-tetraoxo-16-oxa-13,20,24-t riazanonacos-1-yl]-4-hydroxy-2-pyrrolidinyl)methyl ester
cagggcatcatcaatttcgat

SEQ ID NO: 652 - RNA, 21 nt, synthetic construct
  source 1..21: mol_type = other RNA
  modified_base 1: mod_base = OTHER; note = 2'-O-methyladenosine-3'-phosphorothioate
  modified_base 2: mod_base = OTHER; note = 2'-O-methylguanosine-3'-phosphorothioate
  modified_base 3: mod_base = OTHER; note = 2'-O-methylguanosine-3'-phosphate
  modified_base 4: mod_base = OTHER; note = 2'-O-methylguanosine-3'-phosphate
  modified_base 5: mod_base = OTHER; note = 2'-O-methylcytidine-3'-phosphate
  modified_base 6: mod_base = OTHER; note = 2'-O-methyladenosine-3'-phosphate
  modified_base 7: mod_base = OTHER; note = 2'-deoxy-2'-fluorouridine-3'-phosphate
  modified_base 8: mod_base = OTHER; note = 2'-O-methylcytidine-3'-phosphate
  modified_base 9: mod_base = OTHER; note = 2'-deoxy-2'-fluoroadenosine-3'-phosphate
  modified_base 10: mod_base = OTHER; note = 2'-deoxy-2'-fluorouridine-3'-phosphate
  modified_base 11: mod_base = OTHER; note = 2'-deoxy-2'-fluorocytidine-3'-phosphate
  modified_base 12: mod_base = OTHER; note = 2'-O-methyladenosine-3'-phosphate
  modified_base 13: mod_base = OTHER; note = 2'-O-methyladenosine-3'-phosphate
  modified_base 14: mod_base = OTHER; note = 2'-O-methyluridine-3'-phosphate
  modified_base 15: mod_base = OTHER; note = 2'-O-methyluridine-3'-phosphate
  modified_base 16: mod_base = OTHER; note = 2'-O-methyluridine-3'-phosphate
  modified_base 17: mod_base = OTHER; note = 2'-O-methylcytidine-3'-phosphate
  modified_base 18: mod_base = OTHER; note = 2'-O-methylguanosine-3'-phosphate
  modified_base 19: mod_base = OTHER; note = 2'-O-methyladenosine-3'-phosphate
  modified_base 20: mod_base = OTHER; note = 2'-O-methylguanosine-3'-phosphate
  modified_base 21: mod_base = OTHER; note = 2'-O-methyluridine-3'-phosphate ((2S,4R)-1-[29-[[2-(acetylamino)-2-deoxy-beta-D-galactopyra nosyl]oxy]-14,14-bis[[3-[[3-[[5-[[2-(acetylamino)-2-deoxy-b eta-D-galactopyranosyl]oxy]-1-oxopentyl]amino]propyl]amino] -3-oxopropoxy]methyl]-1,12,19,25-tetraoxo-16-oxa-13,20,24-t riazanonacos-1-yl]-4-hydroxy-2-pyrrolidinyl)methyl ester
agggcatcatcaatttcgagt

SEQ ID NO: 653 - RNA, 21 nt, synthetic construct
  source 1..21: mol_type = other RNA
  modified_base 1: mod_base = OTHER; note = 2'-O-methylguanosine-3'-phosphorothioate
  modified_base 2: mod_base = OTHER; note = 2'-O-methylguanosine-3'-phosphorothioate
  modified_base 3: mod_base = OTHER; note = 2'-O-methylguanosine-3'-phosphate
  modified_base 4: mod_base = OTHER; note = 2'-O-methylcytidine-3'-phosphate
  modified_base 5: mod_base = OTHER; note = 2'-O-methyladenosine-3'-phosphate
  modified_base 6: mod_base = OTHER; note = 2'-O-methyluridine-3'-phosphate
  modified_base 7: mod_base = OTHER; note = 2'-deoxy-2'-fluorocytidine-3'-phosphate
  modified_base 8: mod_base = OTHER; note = 2'-O-methyladenosine-3'-phosphate
  modified_base 9: mod_base = OTHER; note = 2'-deoxy-2'-fluorouridine-3'-phosphate
  modified_base 10: mod_base = OTHER; note = 2'-deoxy-2'-fluorocytidine-3'-phosphate
  modified_base 11: mod_base = OTHER; note = 2'-deoxy-2'-fluoroadenosine-3'-phosphate
  modified_base 12: mod_base = OTHER; note = 2'-O-methyladenosine-3'-phosphate
  modified_base 13: mod_base = OTHER; note = 2'-O-methyluridine-3'-phosphate
  modified_base 14: mod_base = OTHER; note = 2'-O-methyluridine-3'-phosphate
  modified_base 15: mod_base = OTHER; note = 2'-O-methyluridine-3'-phosphate
  modified_base 16: mod_base = OTHER; note = 2'-O-methylcytidine-3'-phosphate
  modified_base 17: mod_base = OTHER; note = 2'-O-methylguanosine-3'-phosphate
  modified_base 18: mod_base = OTHER; note = 2'-O-methyladenosine-3'-phosphate
  modified_base 19: mod_base = OTHER; note = 2'-O-methylguanosine-3'-phosphate
  modified_base 20: mod_base = OTHER; note = 2'-O-methylcytidine-3'-phosphate
  modified_base 21: mod_base = OTHER; note = 2'-O-methyladenosine-3'-phosphate ((2S,4R)-1-[29-[[2-(acetylamino)-2-deoxy-beta-D-galactopyra nosyl]oxy]-14,14-bis[[3-[[3-[[5-[[2-(acetylamino)-2-deoxy-b eta-D-galactopyranosyl]oxy]-1-oxopentyl]amino]propyl]amino] -3-oxopropoxy]methyl]-1,12,19,25-tetraoxo-16-oxa-13,20,24-t riazanonacos-1-yl]-4-hydroxy-2-pyrrolidinyl)methyl ester
gggcatcatcaatttcgagca

SEQ ID NO: 654 - RNA, 21 nt, synthetic construct
  source 1..21: mol_type = other RNA
  modified_base 1: mod_base = OTHER; note = 2'-O-methylguanosine-3'-phosphorothioate
  modified_base 2: mod_base = OTHER; note = 2'-O-methylguanosine-3'-phosphorothioate
  modified_base 3: mod_base = OTHER; note = 2'-O-methylcytidine-3'-phosphate
  modified_base 4: mod_base = OTHER; note = 2'-O-methyladenosine-3'-phosphate
  modified_base 5: mod_base = OTHER; note = 2'-O-methyluridine-3'-phosphate
  modified_base 6: mod_base = OTHER; note = 2'-O-methylcytidine-3'-phosphate
  modified_base 7: mod_base = OTHER; note = 2'-deoxy-2'-fluoroadenosine-3'-phosphate
  modified_base 8: mod_base = OTHER; note = 2'-O-methyluridine-3'-phosphate
  modified_base 9: mod_base = OTHER; note = 2'-deoxy-2'-fluorocytidine-3'-phosphate
  modified_base 10: mod_base = OTHER; note = 2'-deoxy-2'-fluoroadenosine-3'-phosphate
  modified_base 11: mod_base = OTHER; note = 2'-deoxy-2'-fluoroadenosine-3'-phosphate
  modified_base 12: mod_base = OTHER; note = 2'-O-methyluridine-3'-phosphate
  modified_base 13: mod_base = OTHER; note = 2'-O-methyluridine-3'-phosphate
  modified_base 14: mod_base = OTHER; note = 2'-O-methyluridine-3'-phosphate
  modified_base 15: mod_base = OTHER; note = 2'-O-methylcytidine-3'-phosphate
  modified_base 16: mod_base = OTHER; note = 2'-O-methylguanosine-3'-phosphate
  modified_base 17: mod_base = OTHER; note = 2'-O-methyladenosine-3'-phosphate
  modified_base 18: mod_base = OTHER; note = 2'-O-methylguanosine-3'-phosphate
  modified_base 19: mod_base = OTHER; note = 2'-O-methylcytidine-3'-phosphate
  modified_base 20: mod_base = OTHER; note = 2'-O-methyladenosine-3'-phosphate
  modified_base 21: mod_base = OTHER; note = 2'-O-methyluridine-3'-phosphate ((2S,4R)-1-[29-[[2-(acetylamino)-2-deoxy-beta-D-galactopyra nosyl]oxy]-14,14-bis[[3-[[3-[[5-[[2-(acetylamino)-2-deoxy-b eta-D-galactopyranosyl]oxy]-1-oxopentyl]amino]propyl]amino] -3-oxopropoxy]methyl]-1,12,19,25-tetraoxo-16-oxa-13,20,24-t riazanonacos-1-yl]-4-hydroxy-2-pyrrolidinyl)methyl ester
ggcatcatcaatttcgagcat

SEQ ID NO: 655 - RNA, 21 nt, synthetic construct
  source 1..21: mol_type = other RNA
  modified_base 1: mod_base = OTHER; note = 2'-O-methylcytidine-3'-phosphorothioate
  modified_base 2: mod_base = OTHER; note = 2'-O-methyladenosine-3'-phosphorothioate
  modified_base 3: mod_base = OTHER; note = 2'-O-methyluridine-3'-phosphate
  modified_base 4: mod_base = OTHER; note = 2'-O-methylcytidine-3'-phosphate
  modified_base 5: mod_base = OTHER; note = 2'-O-methyladenosine-3'-phosphate
  modified_base 6: mod_base = OTHER; note = 2'-O-methyluridine-3'-phosphate
  modified_base 7: mod_base = OTHER; note = 2'-deoxy-2'-fluorocytidine-3'-phosphate
  modified_base 8: mod_base = OTHER; note = 2'-O-methyladenosine-3'-phosphate
  modified_base 9: mod_base = OTHER; note = 2'-deoxy-2'-fluoroadenosine-3'-phosphate
  modified_base 10: mod_base = OTHER; note = 2'-deoxy-2'-fluorouridine-3'-phosphate
  modified_base 11: mod_base = OTHER; note = 2'-deoxy-2'-fluorouridine-3'-phosphate
  modified_base 12: mod_base = OTHER; note = 2'-O-methyluridine-3'-phosphate
  modified_base 13: mod_base = OTHER; note = 2'-O-methylcytidine-3'-phosphate
  modified_base 14: mod_base = OTHER; note = 2'-O-methylguanosine-3'-phosphate
  modified_base 15: mod_base = OTHER; note = 2'-O-methyladenosine-3'-phosphate
  modified_base 16: mod_base = OTHER; note = 2'-O-methylguanosine-3'-phosphate
  modified_base 17: mod_base = OTHER; note = 2'-O-methylcytidine-3'-phosphate
  modified_base 18: mod_base = OTHER; note = 2'-O-methyladenosine-3'-phosphate
  modified_base 19: mod_base = OTHER; note = 2'-O-methylguanosine-3'-phosphate
  modified_base 20: mod_base = OTHER; note = 2'-O-methyladenosine-3'-phosphate
  modified_base 21: mod_base = OTHER; note = 2'-O-methyladenosine-3'-phosphate ((2S,4R)-1-[29-[[2-(acetylamino)-2-deoxy-beta-D-galactopyra nosyl]oxy]-14,14-bis[[3-[[3-[[5-[[2-(acetylamino)-2-deoxy-b eta-D-galactopyranosyl]oxy]-1-oxopentyl]amino]propyl]amino] -3-oxopropoxy]methyl]-1,12,19,25-tetraoxo-16-oxa-13,20,24-t riazanonacos-1-yl]-4-hydroxy-2-pyrrolidinyl)methyl ester
catcatcaatttcgagcagaa

SEQ ID NO: 656 - RNA, 21 nt, synthetic construct
  source 1..21: mol_type = other RNA
  modified_base 1: mod_base = OTHER; note = 2'-O-methyladenosine-3'-phosphorothioate
  modified_base 2: mod_base = OTHER; note = 2'-O-methyluridine-3'-phosphorothioate
  modified_base 3: mod_base = OTHER; note = 2'-O-methylcytidine-3'-phosphate
  modified_base 4: mod_base = OTHER; note = 2'-O-methyladenosine-3'-phosphate
  modified_base 5: mod_base = OTHER; note = 2'-O-methyluridine-3'-phosphate
  modified_base 6: mod_base = OTHER; note = 2'-O-methylcytidine-3'-phosphate
  modified_base 7: mod_base = OTHER; note = 2'-deoxy-2'-fluoroadenosine-3'-phosphate
  modified_base 8: mod_base = OTHER; note = 2'-O-methyladenosine-3'-phosphate
  modified_base 9: mod_base = OTHER; note = 2'-deoxy-2'-fluorouridine-3'-phosphate
  modified_base 10: mod_base = OTHER; note = 2'-deoxy-2'-fluorouridine-3'-phosphate
  modified_base 11: mod_base = OTHER; note = 2'-deoxy-2'-fluorouridine-3'-phosphate
  modified_base 12: mod_base = OTHER; note = 2'-O-methylcytidine-3'-phosphate
  modified_base 13: mod_base = OTHER; note = 2'-O-methylguanosine-3'-phosphate
  modified_base 14: mod_base = OTHER; note = 2'-O-methyladenosine-3'-phosphate
  modified_base 15: mod_base = OTHER; note = 2'-O-methylguanosine-3'-phosphate
  modified_base 16: mod_base = OTHER; note = 2'-O-methylcytidine-3'-phosphate
  modified_base 17: mod_base = OTHER; note = 2'-O-methyladenosine-3'-phosphate
  modified_base 18: mod_base = OTHER; note = 2'-O-methylguanosine-3'-phosphate
  modified_base 19: mod_base = OTHER; note = 2'-O-methyladenosine-3'-phosphate
  modified_base 20: mod_base = OTHER; note = 2'-O-methyladenosine-3'-phosphate
  modified_base 21: mod_base = OTHER; note = 2'-O-methyluridine-3'-phosphate ((2S,4R)-1-[29-[[2-(acetylamino)-2-deoxy-beta-D-galactopyra nosyl]oxy]-14,14-bis[[3-[[3-[[5-[[2-(acetylamino)-2-deoxy-b eta-D-galactopyranosyl]oxy]-1-oxopentyl]amino]propyl]amino] -3-oxopropoxy]methyl]-1,12,19,25-tetraoxo-16-oxa-13,20,24-t riazanonacos-1-yl]-4-hydroxy-2-pyrrolidinyl)methyl ester
atcatcaatttcgagcagaat

SEQ ID NO: 657 - RNA, 21 nt, synthetic construct
  source 1..21: mol_type = other RNA
  modified_base 1: mod_base = OTHER; note = 2'-O-methyluridine-3'-phosphorothioate
  modified_base 2: mod_base = OTHER; note = 2'-O-methylcytidine-3'-phosphorothioate
  modified_base 3: mod_base = OTHER; note = 2'-O-methyladenosine-3'-phosphate
  modified_base 4: mod_base = OTHER; note = 2'-O-methyluridine-3'-phosphate
  modified_base 5: mod_base = OTHER; note = 2'-O-methylcytidine-3'-phosphate
  modified_base 6: mod_base = OTHER; note = 2'-O-methyladenosine-3'-phosphate
  modified_base 7: mod_base = OTHER; note = 2'-deoxy-2'-fluoroadenosine-3'-phosphate
  modified_base 8: mod_base = OTHER; note = 2'-O-methyluridine-3'-phosphate
  modified_base 9: mod_base = OTHER; note = 2'-deoxy-2'-fluorouridine-3'-phosphate
  modified_base 10: mod_base = OTHER; note = 2'-deoxy-2'-fluorouridine-3'-phosphate
  modified_base 11: mod_base = OTHER; note = 2'-deoxy-2'-fluorocytidine-3'-phosphate
  modified_base 12: mod_base = OTHER; note = 2'-O-methylguanosine-3'-phosphate
  modified_base 13: mod_base = OTHER; note = 2'-O-methyladenosine-3'-phosphate
  modified_base 14: mod_base = OTHER; note = 2'-O-methylguanosine-3'-phosphate
  modified_base 15: mod_base = OTHER; note = 2'-O-methylcytidine-3'-phosphate
  modified_base 16: mod_base = OTHER; note = 2'-O-methyladenosine-3'-phosphate
  modified_base 17: mod_base = OTHER; note = 2'-O-methylguanosine-3'-phosphate
  modified_base 18: mod_base = OTHER; note = 2'-O-methyladenosine-3'-phosphate
  modified_base 19: mod_base = OTHER; note = 2'-O-methyladenosine-3'-phosphate
  modified_base 20: mod_base = OTHER; note = 2'-O-methylguanosine-3'-phosphate
  modified_base 21: mod_base = OTHER; note = 2'-O-methyluridine-3'-phosphate ((2S,4R)-1-[29-[[2-(acetylamino)-2-deoxy-beta-D-galactopyra nosyl]oxy]-14,14-bis[[3-[[3-[[5-[[2-(acetylamino)-2-deoxy-b eta-D-galactopyranosyl]oxy]-1-oxopentyl]amino]propyl]amino] -3-oxopropoxy]methyl]-1,12,19,25-tetraoxo-16-oxa-13,20,24-t riazanonacos-1-yl]-4-hydroxy-2-pyrrolidinyl)methyl ester
tcatcaatttcgagcagaagt

SEQ ID NO: 658 - RNA, 21 nt, synthetic construct
  source 1..21: mol_type = other RNA
  modified_base 1: mod_base = OTHER; note = 2'-O-methyladenosine-3'-phosphorothioate
  modified_base 2: mod_base = OTHER; note = 2'-O-methyluridine-3'-phosphorothioate
  modified_base 3: mod_base = OTHER; note = 2'-O-methyluridine-3'-phosphate
  modified_base 4: mod_base = OTHER; note = 2'-O-methyladenosine-3'-phosphate
  modified_base 5: mod_base = OTHER; note = 2'-O-methyladenosine-3'-phosphate
  modified_base 6: mod_base = OTHER; note = 2'-O-methyladenosine-3'-phosphate
  modified_base 7: mod_base = OTHER; note = 2'-deoxy-2'-fluoroguanosine-3'-phosphate
  modified_base 8: mod_base = OTHER; note = 2'-O-methylguanosine-3'-phosphate
  modified_base 9: mod_base = OTHER; note = 2'-deoxy-2'-fluoroadenosine-3'-phosphate
  modified_base 10: mod_base = OTHER; note = 2'-deoxy-2'-fluorocytidine-3'-phosphate
  modified_base 11: mod_base = OTHER; note = 2'-deoxy-2'-fluorouridine-3'-phosphate
  modified_base 12: mod_base = OTHER; note = 2'-O-methylguanosine-3'-phosphate
  modified_base 13: mod_base = OTHER; note = 2'-O-methyladenosine-3'-phosphate
  modified_base 14: mod_base = OTHER; note = 2'-O-methylcytidine-3'-phosphate
  modified_base 15: mod_base = OTHER; note = 2'-O-methyluridine-3'-phosphate
  modified_base 16: mod_base = OTHER; note = 2'-O-methylguanosine-3'-phosphate
  modified_base 17: mod_base = OTHER; note = 2'-O-methyladenosine-3'-phosphate
  modified_base 18: mod_base = OTHER; note = 2'-O-methyladenosine-3'-phosphate
  modified_base 19: mod_base = OTHER; note = 2'-O-methylguanosine-3'-phosphate
  modified_base 20: mod_base = OTHER; note = 2'-O-methylguanosine-3'-phosphate
  modified_base 21: mod_base = OTHER; note = 2'-O-methyluridine-3'-phosphate ((2S,4R)-1-[29-[[2-(acetylamino)-2-deoxy-beta-D-galactopyra nosyl]oxy]-14,14-bis[[3-[[3-[[5-[[2-(acetylamino)-2-deoxy-b eta-D-galactopyranosyl]oxy]-1-oxopentyl]amino]propyl]amino] -3-oxopropoxy]methyl]-1,12,19,25-tetraoxo-16-oxa-13,20,24-t riazanonacos-1-yl]-4-hydroxy-2-pyrrolidinyl)methyl ester
attaaaggactgactgaaggt

SEQ ID NO: 659 - RNA, 21 nt, synthetic construct
  source 1..21: mol_type = other RNA
  modified_base 1: mod_base = OTHER; note = 2'-O-methylcytidine-3'-phosphorothioate
  modified_base 2: mod_base = OTHER; note = 2'-O-methyladenosine-3'-phosphorothioate
  modified_base 3: mod_base = OTHER; note = 2'-O-methyluridine-3'-phosphate
  modified_base 4: mod_base = OTHER; note = 2'-O-methylguanosine-3'-phosphate
  modified_base 5: mod_base = OTHER; note = 2'-O-methyluridine-3'-phosphate
  modified_base 6: mod_base = OTHER; note = 2'-O-methyluridine-3'-phosphate
  modified_base 7: mod_base = OTHER; note = 2'-deoxy-2'-fluorocytidine-3'-phosphate
  modified_base 8: mod_base = OTHER; note = 2'-O-methyladenosine-3'-phosphate
  modified_base 9: mod_base = OTHER; note = 2'-deoxy-2'-fluorouridine-3'-phosphate
  modified_base 10: mod_base = OTHER; note = 2'-deoxy-2'-fluoroguanosine-3'-phosphate
  modified_base 11: mod_base = OTHER; note = 2'-deoxy-2'-fluoroadenosine-3'-phosphate
  modified_base 12: mod_base = OTHER; note = 2'-O-methylguanosine-3'-phosphate
  modified_base 13: mod_base = OTHER; note = 2'-O-methyluridine-3'-phosphate
  modified_base 14: mod_base = OTHER; note = 2'-O-methyluridine-3'-phosphate
  modified_base 15: mod_base = OTHER; note = 2'-O-methyluridine-3'-phosphate
  modified_base 16: mod_base = OTHER; note = 2'-O-methylguanosine-3'-phosphate
  modified_base 17: mod_base = OTHER; note = 2'-O-methylguanosine-3'-phosphate
  modified_base 18: mod_base = OTHER; note = 2'-O-methyladenosine-3'-phosphate
  modified_base 19: mod_base = OTHER; note = 2'-O-methylguanosine-3'-phosphate
  modified_base 20: mod_base = OTHER; note = 2'-O-methyladenosine-3'-phosphate
  modified_base 21: mod_base = OTHER; note = 2'-O-methyluridine-3'-phosphate ((2S,4R)-1-[29-[[2-(acetylamino)-2-deoxy-beta-D-galactopyra nosyl]oxy]-14,14-bis[[3-[[3-[[5-[[2-(acetylamino)-2-deoxy-b eta-D-galactopyranosyl]oxy]-1-oxopentyl]amino]propyl]amino] -3-oxopropoxy]methyl]-1,12,19,25-tetraoxo-16-oxa-13,20,24-t riazanonacos-1-yl]-4-hydroxy-2-pyrrolidinyl)methyl ester
catgttcatgagtttggagat

SEQ ID NO: 660 - RNA, 21 nt, synthetic construct
  source 1..21: mol_type = other RNA
  modified_base 1: mod_base = OTHER; note = 2'-O-methylguanosine-3'-phosphorothioate
  modified_base 2: mod_base = OTHER; note = 2'-O-methyluridine-3'-phosphorothioate
  modified_base 3: mod_base = OTHER; note = 2'-O-methyluridine-3'-phosphate
  modified_base 4: mod_base = OTHER; note = 2'-O-methylcytidine-3'-phosphate
  modified_base 5: mod_base = OTHER; note = 2'-O-methyladenosine-3'-phosphate
  modified_base 6: mod_base = OTHER; note = 2'-O-methyluridine-3'-phosphate
  modified_base 7: mod_base = OTHER; note = 2'-deoxy-2'-fluoroguanosine-3'-phosphate
  modified_base 8: mod_base = OTHER; note = 2'-O-methyladenosine-3'-phosphate
  modified_base 9: mod_base = OTHER; note = 2'-deoxy-2'-fluoroguanosine-3'-phosphate
  modified_base 10: mod_base = OTHER; note = 2'-deoxy-2'-fluorouridine-3'-phosphate
  modified_base 11: mod_base = OTHER; note = 2'-deoxy-2'-fluorouridine-3'-phosphate
  modified_base 12: mod_base = OTHER; note = 2'-O-methyluridine-3'-phosphate
  modified_base 13: mod_base = OTHER; note = 2'-O-methylguanosine-3'-phosphate
  modified_base 14: mod_base = OTHER; note = 2'-O-methylguanosine-3'-phosphate
  modified_base 15: mod_base = OTHER; note = 2'-O-methyladenosine-3'-phosphate
  modified_base 16: mod_base = OTHER; note = 2'-O-methylguanosine-3'-phosphate
  modified_base 17: mod_base = OTHER; note = 2'-O-methyladenosine-3'-phosphate
  modified_base 18: mod_base = OTHER; note = 2'-O-methyluridine-3'-phosphate
  modified_base 19: mod_base = OTHER; note = 2'-O-methyladenosine-3'-phosphate
  modified_base 20: mod_base = OTHER; note = 2'-O-methyladenosine-3'-phosphate
  modified_base 21: mod_base = OTHER; note = 2'-O-methyluridine-3'-phosphate ((2S,4R)-1-[29-[[2-(acetylamino)-2-deoxy-beta-D-galactopyra nosyl]oxy]-14,14-bis[[3-[[3-[[5-[[2-(acetylamino)-2-deoxy-b eta-D-galactopyranosyl]oxy]-1-oxopentyl]amino]propyl]amino] -3-oxopropoxy]methyl]-1,12,19,25-tetraoxo-16-oxa-13,20,24-t riazanonacos-1-yl]-4-hydroxy-2-pyrrolidinyl)methyl ester
gttcatgagtttggagataat

SEQ ID NO: 661 - RNA, 21 nt, synthetic construct
  source 1..21: mol_type = other RNA
  modified_base 1: mod_base = OTHER; note = 2'-O-methyluridine-3'-phosphorothioate
  modified_base 2: mod_base = OTHER; note = 2'-O-methyluridine-3'-phosphorothioate
  modified_base 3: mod_base = OTHER; note = 2'-O-methylcytidine-3'-phosphate
  modified_base 4: mod_base = OTHER; note = 2'-O-methyladenosine-3'-phosphate
  modified_base 5: mod_base = OTHER; note = 2'-O-methyluridine-3'-phosphate
  modified_base 6: mod_base = OTHER; note = 2'-O-methylguanosine-3'-phosphate
  modified_base 7: mod_base = OTHER; note = 2'-deoxy-2'-fluoroadenosine-3'-phosphate
  modified_base 8: mod_base = OTHER; note = 2'-O-methylguanosine-3'-phosphate
  modified_base 9: mod_base = OTHER; note = 2'-deoxy-2'-fluorouridine-3'-phosphate
  modified_base 10: mod_base = OTHER; note = 2'-deoxy-2'-fluorouridine-3'-phosphate
  modified_base 11: mod_base = OTHER; note = 2'-deoxy-2'-fluorouridine-3'-phosphate
  modified_base 12: mod_base = OTHER; note = 2'-O-methylguanosine-3'-phosphate
  modified_base 13: mod_base = OTHER; note = 2'-O-methylguanosine-3'-phosphate
  modified_base 14: mod_base = OTHER; note = 2'-O-methyladenosine-3'-phosphate
  modified_base 15: mod_base = OTHER; note = 2'-O-methylguanosine-3'-phosphate
  modified_base 16: mod_base = OTHER; note = 2'-O-methyladenosine-3'-phosphate
  modified_base 17: mod_base = OTHER; note = 2'-O-methyluridine-3'-phosphate
  modified_base 18: mod_base = OTHER; note = 2'-O-methyladenosine-3'-phosphate
  modified_base 19: mod_base = OTHER; note = 2'-O-methyladenosine-3'-phosphate
  modified_base 20: mod_base = OTHER; note = 2'-O-methyluridine-3'-phosphate
  modified_base 21: mod_base = OTHER; note = 2'-O-methyladenosine-3'-phosphate ((2S,4R)-1-[29-[[2-(acetylamino)-2-deoxy-beta-D-galactopyra nosyl]oxy]-14,14-bis[[3-[[3-[[5-[[2-(acetylamino)-2-deoxy-b eta-D-galactopyranosyl]oxy]-1-oxopentyl]amino]propyl]amino] -3-oxopropoxy]methyl]-1,12,19,25-tetraoxo-16-oxa-13,20,24-t riazanonacos-1-yl]-4-hydroxy-2-pyrrolidinyl)methyl ester
ttcatgagtttggagataata

SEQ ID NO: 662 - RNA, 21 nt, synthetic construct
  source 1..21: mol_type = other RNA
  modified_base 1: mod_base = OTHER; note = 2'-O-methyladenosine-3'-phosphorothioate
  modified_base 2: mod_base = OTHER; note = 2'-O-methyluridine-3'-phosphorothioate
  modified_base 3: mod_base = OTHER; note = 2'-O-methylguanosine-3'-phosphate
  modified_base 4: mod_base = OTHER; note = 2'-O-methyladenosine-3'-phosphate
  modified_base 5: mod_base = OTHER; note = 2'-O-methylguanosine-3'-phosphate
  modified_base 6: mod_base = OTHER; note = 2'-O-methyluridine-3'-phosphate
  modified_base 7: mod_base = OTHER; note = 2'-deoxy-2'-fluorouridine-3'-phosphate
  modified_base 8: mod_base = OTHER; note = 2'-O-methyluridine-3'-phosphate
  modified_base 9: mod_base = OTHER; note = 2'-deoxy-2'-fluoroguanosine-3'-phosphate
  modified_base 10: mod_base = OTHER; note = 2'-deoxy-2'-fluoroguanosine-3'-phosphate
  modified_base 11: mod_base = OTHER; note = 2'-deoxy-2'-fluoroadenosine-3'-phosphate
  modified_base 12: mod_base = OTHER; note = 2'-O-methylguanosine-3'-phosphate
  modified_base 13: mod_base = OTHER; note = 2'-O-methyladenosine-3'-phosphate
  modified_base 14: mod_base = OTHER; note = 2'-O-methyluridine-3'-phosphate
  modified_base 15: mod_base = OTHER; note = 2'-O-methyladenosine-3'-phosphate
  modified_base 16: mod_base = OTHER; note = 2'-O-methyladenosine-3'-phosphate
  modified_base 17: mod_base = OTHER; note = 2'-O-methyluridine-3'-phosphate
  modified_base 18: mod_base = OTHER; note = 2'-O-methyladenosine-3'-phosphate
  modified_base 19: mod_base = OTHER; note = 2'-O-methylcytidine-3'-phosphate
  modified_base 20: mod_base = OTHER; note = 2'-O-methyladenosine-3'-phosphate
  modified_base 21: mod_base = OTHER; note = 2'-O-methyluridine-3'-phosphate ((2S,4R)-1-[29-[[2-(acetylamino)-2-deoxy-beta-D-galactopyra nosyl]oxy]-14,14-bis[[3-[[3-[[5-[[2-(acetylamino)-2-deoxy-b eta-D-galactopyranosyl]oxy]-1-oxopentyl]amino]propyl]amino] -3-oxopropoxy]methyl]-1,12,19,25-tetraoxo-16-oxa-13,20,24-t riazanonacos-1-yl]-4-hydroxy-2-pyrrolidinyl)methyl ester
atgagtttggagataatacat

SEQ ID NO: 663 - RNA, 21 nt, synthetic construct
  source 1..21: mol_type = other RNA
  modified_base 1: mod_base = OTHER; note = 2'-O-methyluridine-3'-phosphorothioate
  modified_base 2: mod_base = OTHER; note = 2'-O-methylguanosine-3'-phosphorothioate
  modified_base 3: mod_base = OTHER; note = 2'-O-methyluridine-3'-phosphate
  modified_base 4: mod_base = OTHER; note = 2'-O-methylguanosine-3'-phosphate
  modified_base 5: mod_base = OTHER; note = 2'-O-methyluridine-3'-phosphate
  modified_base 6: mod_base = OTHER; note = 2'-O-methylcytidine-3'-phosphate
  modified_base 7: mod_base = OTHER; note = 2'-deoxy-2'-fluorouridine-3'-phosphate
  modified_base 8: mod_base = OTHER; note = 2'-O-methyladenosine-3'-phosphate
  modified_base 9: mod_base = OTHER; note = 2'-deoxy-2'-fluorouridine-3'-phosphate
  modified_base 10: mod_base = OTHER; note = 2'-deoxy-2'-fluorouridine-3'-phosphate
  modified_base 11: mod_base = OTHER; note = 2'-deoxy-2'-fluoroguanosine-3'-phosphate
  modified_base 12: mod_base = OTHER; note = 2'-O-methyladenosine-3'-phosphate
  modified_base 13: mod_base = OTHER; note = 2'-O-methyladenosine-3'-phosphate
  modified_base 14: mod_base = OTHER; note = 2'-O-methylguanosine-3'-phosphate
  modified_base 15: mod_base = OTHER; note = 2'-O-methyladenosine-3'-phosphate
  modified_base 16: mod_base = OTHER; note = 2'-O-methyluridine-3'-phosphate
  modified_base 17: mod_base = OTHER; note = 2'-O-methyluridine-3'-phosphate
  modified_base 18: mod_base = OTHER; note = 2'-O-methylcytidine-3'-phosphate
  modified_base 19: mod_base = OTHER; note = 2'-O-methyluridine-3'-phosphate
  modified_base 20: mod_base = OTHER; note = 2'-O-methylguanosine-3'-phosphate
  modified_base 21: mod_base = OTHER; note = 2'-O-methyluridine-3'-phosphate ((2S,4R)-1-[29-[[2-(acetylamino)-2-deoxy-beta-D-galactopyra nosyl]oxy]-14,14-bis[[3-[[3-[[5-[[2-(acetylamino)-2-deoxy-b eta-D-galactopyranosyl]oxy]-1-oxopentyl]amino]propyl]amino] -3-oxopropoxy]methyl]-1,12,19,25-tetraoxo-16-oxa-13,20,24-t riazanonacos-1-yl]-4-hydroxy-2-pyrrolidinyl)methyl ester
tgtgtctattgaagattctgt

SEQ ID NO: 664 - RNA, 21 nt, synthetic construct
  source 1..21: mol_type = other RNA
  modified_base 1: mod_base = OTHER; note = 2'-O-methylguanosine-3'-phosphorothioate
  modified_base 2: mod_base = OTHER; note = 2'-O-methyluridine-3'-phosphorothioate
  modified_base 3: mod_base = OTHER; note = 2'-O-methylguanosine-3'-phosphate
  modified_base 4: mod_base = OTHER; note = 2'-O-methyluridine-3'-phosphate
  modified_base 5: mod_base = OTHER; note = 2'-O-methylcytidine-3'-phosphate
  modified_base 6: mod_base = OTHER; note = 2'-O-methyluridine-3'-phosphate
  modified_base 7: mod_base = OTHER; note = 2'-deoxy-2'-fluoroadenosine-3'-phosphate
  modified_base 8: mod_base = OTHER; note = 2'-O-methyluridine-3'-phosphate
  modified_base 9: mod_base = OTHER; note = 2'-deoxy-2'-fluorouridine-3'-phosphate
  modified_base 10: mod_base = OTHER; note = 2'-deoxy-2'-fluoroguanosine-3'-phosphate
  modified_base 11: mod_base = OTHER; note = 2'-deoxy-2'-fluoroadenosine-3'-phosphate
  modified_base 12: mod_base = OTHER; note = 2'-O-methyladenosine-3'-phosphate
  modified_base 13: mod_base = OTHER; note = 2'-O-methylguanosine-3'-phosphate
  modified_base 14: mod_base = OTHER; note = 2'-O-methyladenosine-3'-phosphate
  modified_base 15: mod_base = OTHER; note = 2'-O-methyluridine-3'-phosphate
  modified_base 16: mod_base = OTHER; note = 2'-O-methyluridine-3'-phosphate
  modified_base 17: mod_base = OTHER; note = 2'-O-methylcytidine-3'-phosphate
  modified_base 18: mod_base = OTHER; note = 2'-O-methyluridine-3'-phosphate
  modified_base 19: mod_base = OTHER; note = 2'-O-methylguanosine-3'-phosphate
  modified_base 20: mod_base = OTHER; note = 2'-O-methyluridine-3'-phosphate
  modified_base 21: mod_base = OTHER; note = 2'-O-methyluridine-3'-phosphate ((2S,4R)-1-[29-[[2-(acetylamino)-2-deoxy-beta-D-galactopyra nosyl]oxy]-14,14-bis[[3-[[3-[[5-[[2-(acetylamino)-2-deoxy-b eta-D-galactopyranosyl]oxy]-1-oxopentyl]amino]propyl]amino] -3-oxopropoxy]methyl]-1,12,19,25-tetraoxo-16-oxa-13,20,24-t riazanonacos-1-yl]-4-hydroxy-2-pyrrolidinyl)methyl ester
gtgtctattgaagattctgtt

SEQ ID NO: 665 - RNA, 21 nt, synthetic construct
  source 1..21: mol_type = other RNA
  modified_base 1: mod_base = OTHER; note = 2'-O-methyluridine-3'-phosphorothioate
  modified_base 2: mod_base = OTHER; note = 2'-O-methylguanosine-3'-phosphorothioate
  modified_base 3: mod_base = OTHER; note = 2'-O-methylguanosine-3'-phosphate
  modified_base 4: mod_base = OTHER; note = 2'-O-methyluridine-3'-phosphate
  modified_base 5: mod_base = OTHER; note = 2'-O-methylguanosine-3'-phosphate
  modified_base 6: mod_base = OTHER; note = 2'-O-methylguanosine-3'-phosphate
  modified_base 7: mod_base = OTHER; note = 2'-deoxy-2'-fluorouridine-3'-phosphate
  modified_base 8: mod_base = OTHER; note = 2'-O-methylcytidine-3'-phosphate
  modified_base 9: mod_base = OTHER; note = 2'-deoxy-2'-fluorocytidine-3'-phosphate
  modified_base 10: mod_base = OTHER; note = 2'-deoxy-2'-fluoroadenosine-3'-phosphate
  modified_base 11: mod_base = OTHER; note = 2'-deoxy-2'-fluorouridine-3'-phosphate
  modified_base 12: mod_base = OTHER; note = 2'-O-methylguanosine-3'-phosphate
  modified_base 13: mod_base = OTHER; note = 2'-O-methyladenosine-3'-phosphate
  modified_base 14: mod_base = OTHER; note = 2'-O-methyladenosine-3'-phosphate
  modified_base 15: mod_base = OTHER; note = 2'-O-methyladenosine-3'-phosphate
  modified_base 16: mod_base = OTHER; note = 2'-O-methyladenosine-3'-phosphate
  modified_base 17: mod_base = OTHER; note = 2'-O-methyladenosine-3'-phosphate
  modified_base 18: mod_base = OTHER; note = 2'-O-methylguanosine-3'-phosphate
  modified_base 19: mod_base = OTHER; note = 2'-O-methylcytidine-3'-phosphate
  modified_base 20: mod_base = OTHER; note = 2'-O-methyladenosine-3'-phosphate
  modified_base 21: mod_base = OTHER; note = 2'-O-methyluridine-3'-phosphate ((2S,4R)-1-[29-[[2-(acetylamino)-2-deoxy-beta-D-galactopyra nosyl]oxy]-14,14-bis[[3-[[3-[[5-[[2-(acetylamino)-2-deoxy-b eta-D-galactopyranosyl]oxy]-1-oxopentyl]amino]propyl]amino] -3-oxopropoxy]methyl]-1,12,19,25-tetraoxo-16-oxa-13,20,24-t riazanonacos-1-yl]-4-hydroxy-2-pyrrolidinyl)methyl ester
tggtggtccatgaaaaagcat

SEQ ID NO: 666 - RNA, 21 nt, synthetic construct
  source 1..21: mol_type = other RNA
  modified_base 1: mod_base = OTHER; note = 2'-O-methylguanosine-3'-phosphorothioate
  modified_base 2: mod_base = OTHER; note = 2'-O-methylguanosine-3'-phosphorothioate
  modified_base 3: mod_base = OTHER; note = 2'-O-methyluridine-3'-phosphate
  modified_base 4: mod_base = OTHER; note = 2'-O-methylguanosine-3'-phosphate
  modified_base 5: mod_base = OTHER; note = 2'-O-methylguanosine-3'-phosphate
  modified_base 6: mod_base = OTHER; note = 2'-O-methyluridine-3'-phosphate
  modified_base 7: mod_base = OTHER; note = 2'-deoxy-2'-fluorocytidine-3'-phosphate
  modified_base 8: mod_base = OTHER; note = 2'-O-methylcytidine-3'-phosphate
  modified_base 9: mod_base = OTHER; note = 2'-deoxy-2'-fluoroadenosine-3'-phosphate
  modified_base 10: mod_base = OTHER; note = 2'-deoxy-2'-fluorouridine-3'-phosphate
  modified_base 11: mod_base = OTHER; note = 2'-deoxy-2'-fluoroguanosine-3'-phosphate
  modified_base 12: mod_base = OTHER; note = 2'-O-methyladenosine-3'-phosphate
  modified_base 13: mod_base = OTHER; note = 2'-O-methyladenosine-3'-phosphate
  modified_base 14: mod_base = OTHER; note = 2'-O-methyladenosine-3'-phosphate
  modified_base 15: mod_base = OTHER; note = 2'-O-methyladenosine-3'-phosphate
  modified_base 16: mod_base = OTHER; note = 2'-O-methyladenosine-3'-phosphate
  modified_base 17: mod_base = OTHER; note = 2'-O-methylguanosine-3'-phosphate
  modified_base 18: mod_base = OTHER; note = 2'-O-methylcytidine-3'-phosphate
  modified_base 19: mod_base = OTHER; note = 2'-O-methyladenosine-3'-phosphate
  modified_base 20: mod_base = OTHER; note = 2'-O-methylguanosine-3'-phosphate
  modified_base 21: mod_base = OTHER; note = 2'-O-methyladenosine-3'-phosphate ((2S,4R)-1-[29-[[2-(acetylamino)-2-deoxy-beta-D-galactopyra nosyl]oxy]-14,14-bis[[3-[[3-[[5-[[2-(acetylamino)-2-deoxy-b eta-D-galactopyranosyl]oxy]-1-oxopentyl]amino]propyl]amino] -3-oxopropoxy]methyl]-1,12,19,25-tetraoxo-16-oxa-13,20,24-t riazanonacos-1-yl]-4-hydroxy-2-pyrrolidinyl)methyl ester
ggtggtccatgaaaaagcaga

SEQ ID NO: 667 - RNA, 21 nt, synthetic construct
  source 1..21: mol_type = other RNA
  modified_base 1: mod_base = OTHER; note = 2'-O-methylguanosine-3'-phosphorothioate
  modified_base 2: mod_base = OTHER; note = 2'-O-methyladenosine-3'-phosphorothioate
  modified_base 3: mod_base = OTHER; note = 2'-O-methylguanosine-3'-phosphate
  modified_base 4: mod_base = OTHER; note = 2'-O-methyladenosine-3'-phosphate
  modified_base 5: mod_base = OTHER; note = 2'-O-methylcytidine-3'-phosphate
  modified_base 6: mod_base = OTHER; note = 2'-O-methylcytidine-3'-phosphate
  modified_base 7: mod_base = OTHER; note = 2'-deoxy-2'-fluoroadenosine-3'-phosphate
  modified_base 8: mod_base = OTHER; note = 2'-O-methyluridine-3'-phosphate
  modified_base 9: mod_base = OTHER; note = 2'-deoxy-2'-fluorouridine-3'-phosphate
  modified_base 10: mod_base = OTHER; note = 2'-deoxy-2'-fluoroguanosine-3'-phosphate
  modified_base 11: mod_base = OTHER; note = 2'-deoxy-2'-fluorocytidine-3'-phosphate
  modified_base 12: mod_base = OTHER; note = 2'-O-methyladenosine-3'-phosphate
  modified_base 13: mod_base = OTHER; note = 2'-O-methyluridine-3'-phosphate
  modified_base 14: mod_base = OTHER; note = 2'-O-methylcytidine-3'-phosphate
  modified_base 15: mod_base = OTHER; note = 2'-O-methyladenosine-3'-phosphate
  modified_base 16: mod_base = OTHER; note = 2'-O-methyluridine-3'-phosphate
  modified_base 17: mod_base = OTHER; note = 2'-O-methyluridine-3'-phosphate
  modified_base 18: mod_base = OTHER; note = 2'-O-methylguanosine-3'-phosphate
  modified_base 19: mod_base = OTHER; note = 2'-O-methylguanosine-3'-phosphate
  modified_base 20: mod_base = OTHER; note = 2'-O-methylcytidine-3'-phosphate
  modified_base 21: mod_base = OTHER; note = 2'-O-methyluridine-3'-phosphate ((2S,4R)-1-[29-[[2-(acetylamino)-2-deoxy-beta-D-galactopyra nosyl]oxy]-14,14-bis[[3-[[3-[[5-[[2-(acetylamino)-2-deoxy-b eta-D-galactopyranosyl]oxy]-1-oxopentyl]amino]propyl]amino] -3-oxopropoxy]methyl]-1,12,19,25-tetraoxo-16-oxa-13,20,24-t riazanonacos-1-yl]-4-hydroxy-2-pyrrolidinyl)methyl ester
gagaccattgcatcattggct

SEQ ID NO: 668 - RNA, 21 nt, synthetic construct
  source 1..21: mol_type = other RNA
  modified_base 1: mod_base = OTHER; note = 2'-O-methyladenosine-3'-phosphorothioate
  modified_base 2: mod_base = OTHER; note = 2'-O-methylcytidine-3'-phosphorothioate
  modified_base 3: mod_base = OTHER; note = 2'-O-methyluridine-3'-phosphate
  modified_base 4: mod_base = OTHER; note = 2'-O-methylguanosine-3'-phosphate
  modified_base 5: mod_base = OTHER; note = 2'-O-methylguanosine-3'-phosphate
  modified_base 6: mod_base = OTHER; note = 2'-O-methyluridine-3'-phosphate
  modified_base 7: mod_base = OTHER; note = 2'-deoxy-2'-fluoroguanosine-3'-phosphate
  modified_base 8: mod_base = OTHER; note = 2'-O-methylguanosine-3'-phosphate
  modified_base 9: mod_base = OTHER; note = 2'-deoxy-2'-fluorouridine-3'-phosphate
  modified_base 10: mod_base = OTHER; note = 2'-deoxy-2'-fluorocytidine-3'-phosphate
  modified_base 11: mod_base = OTHER; note = 2'-deoxy-2'-fluorocytidine-3'-phosphate
  modified_base 12: mod_base = OTHER; note = 2'-O-methyladenosine-3'-phosphate
  modified_base 13: mod_base = OTHER; note = 2'-O-methyluridine-3'-phosphate
  modified_base 14: mod_base = OTHER; note = 2'-O-methylguanosine-3'-phosphate
  modified_base 15: mod_base = OTHER; note = 2'-O-methyladenosine-3'-phosphate
  modified_base 16: mod_base = OTHER; note = 2'-O-methyladenosine-3'-phosphate
  modified_base 17: mod_base = OTHER; note = 2'-O-methyladenosine-3'-phosphate
  modified_base 18: mod_base = OTHER; note = 2'-O-methyladenosine-3'-phosphate
  modified_base 19: mod_base = OTHER; note = 2'-O-methyladenosine-3'-phosphate
  modified_base 20: mod_base = OTHER; note = 2'-O-methylguanosine-3'-phosphate
  modified_base 21: mod_base = OTHER; note = 2'-O-methyluridine-3'-phosphate ((2S,4R)-1-[29-[[2-(acetylamino)-2-deoxy-beta-D-galactopyra nosyl]oxy]-14,14-bis[[3-[[3-[[5-[[2-(acetylamino)-2-deoxy-b eta-D-galactopyranosyl]oxy]-1-oxopentyl]amino]propyl]amino] -3-oxopropoxy]methyl]-1,12,19,25-tetraoxo-16-oxa-13,20,24-t riazanonacos-1-yl]-4-hydroxy-2-pyrrolidinyl)methyl ester
actggtggtccatgaaaaagt

SEQ ID NO: 669 - RNA, 21 nt, synthetic construct
  source 1..21: mol_type = other RNA
  modified_base 1: mod_base = OTHER; note = 2'-O-methylcytidine-3'-phosphorothioate
  modified_base 2: mod_base = OTHER; note = 2'-O-methyluridine-3'-phosphorothioate
  modified_base 3: mod_base = OTHER; note = 2'-O-methylguanosine-3'-phosphate
  modified_base 4: mod_base = OTHER; note = 2'-O-methylguanosine-3'-phosphate
  modified_base 5: mod_base = OTHER; note = 2'-O-methyluridine-3'-phosphate
  modified_base 6: mod_base = OTHER; note = 2'-O-methylguanosine-3'-phosphate
  modified_base 7: mod_base = OTHER; note = 2'-deoxy-2'-fluoroguanosine-3'-phosphate
  modified_base 8: mod_base = OTHER; note = 2'-O-methyluridine-3'-phosphate
  modified_base 9: mod_base = OTHER; note = 2'-deoxy-2'-fluorocytidine-3'-phosphate
  modified_base 10: mod_base = OTHER; note = 2'-deoxy-2'-fluorocytidine-3'-phosphate
  modified_base 11: mod_base = OTHER; note = 2'-deoxy-2'-fluoroadenosine-3'-phosphate
  modified_base 12: mod_base = OTHER; note = 2'-O-methyluridine-3'-phosphate
  modified_base 13: mod_base = OTHER; note = 2'-O-methylguanosine-3'-phosphate
  modified_base 14: mod_base = OTHER; note = 2'-O-methyladenosine-3'-phosphate
  modified_base 15: mod_base = OTHER; note = 2'-O-methyladenosine-3'-phosphate
  modified_base 16: mod_base = OTHER; note = 2'-O-methyladenosine-3'-phosphate
  modified_base 17: mod_base = OTHER; note = 2'-O-methyladenosine-3'-phosphate
  modified_base 18: mod_base = OTHER; note = 2'-O-methyladenosine-3'-phosphate
  modified_base 19: mod_base = OTHER; note = 2'-O-methylguanosine-3'-phosphate
  modified_base 20: mod_base = OTHER; note = 2'-O-methylcytidine-3'-phosphate
  modified_base 21: mod_base = OTHER; note = 2'-O-methyladenosine-3'-phosphate ((2S,4R)-1-[29-[[2-(acetylamino)-2-deoxy-beta-D-galactopyra nosyl]oxy]-14,14-bis[[3-[[3-[[5-[[2-(acetylamino)-2-deoxy-b eta-D-galactopyranosyl]oxy]-1-oxopentyl]amino]propyl]amino] -3-oxopropoxy]methyl]-1,12,19,25-tetraoxo-16-oxa-13,20,24-t riazanonacos-1-yl]-4-hydroxy-2-pyrrolidinyl)methyl ester
ctggtggtccatgaaaaagca

SEQ ID NO: 670 - RNA, 21 nt, synthetic construct
  source 1..21: mol_type = other RNA
  modified_base 1: mod_base = OTHER; note = 2'-O-methyladenosine-3'-phosphorothioate
  modified_base 2: mod_base = OTHER; note = 2'-O-methylguanosine-3'-phosphorothioate
  modified_base 3: mod_base = OTHER; note = 2'-O-methylguanosine-3'-phosphate
  modified_base 4: mod_base = OTHER; note = 2'-O-methyluridine-3'-phosphate
  modified_base 5: mod_base = OTHER; note = 2'-O-methylguanosine-3'-phosphate
  modified_base 6: mod_base = OTHER; note = 2'-O-methylguanosine-3'-phosphate
  modified_base 7: mod_base = OTHER; note = 2'-deoxy-2'-fluoroadenosine-3'-phosphate
  modified_base 8: mod_base = OTHER; note = 2'-O-methyladenosine-3'-phosphate
  modified_base 9: mod_base = OTHER; note = 2'-deoxy-2'-fluoroadenosine-3'-phosphate
  modified_base 10: mod_base = OTHER; note = 2'-deoxy-2'-fluorouridine-3'-phosphate
  modified_base 11: mod_base = OTHER; note = 2'-deoxy-2'-fluoroguanosine-3'-phosphate
  modified_base 12: mod_base = OTHER; note = 2'-O-methyladenosine-3'-phosphate
  modified_base 13: mod_base = OTHER; note = 2'-O-methyladenosine-3'-phosphate
  modified_base 14: mod_base = OTHER; note = 2'-O-methylguanosine-3'-phosphate
  modified_base 15: mod_base = OTHER; note = 2'-O-methyladenosine-3'-phosphate
  modified_base 16: mod_base = OTHER; note = 2'-O-methyladenosine-3'-phosphate
  modified_base 17: mod_base = OTHER; note = 2'-O-methyladenosine-3'-phosphate
  modified_base 18: mod_base = OTHER; note = 2'-O-methylguanosine-3'-phosphate
  modified_base 19: mod_base = OTHER; note = 2'-O-methyluridine-3'-phosphate
  modified_base 20: mod_base = OTHER; note = 2'-O-methyladenosine-3'-phosphate
  modified_base 21: mod_base = OTHER; note = 2'-O-methyluridine-3'-phosphate ((2S,4R)-1-[29-[[2-(acetylamino)-2-deoxy-beta-D-galactopyra nosyl]oxy]-14,14-bis[[3-[[3-[[5-[[2-(acetylamino)-2-deoxy-b eta-D-galactopyranosyl]oxy]-1-oxopentyl]amino]propyl]amino] -3-oxopropoxy]methyl]-1,12,19,25-tetraoxo-16-oxa-13,20,24-t riazanonacos-1-yl]-4-hydroxy-2-pyrrolidinyl)methyl ester
aggtggaaatgaagaaagtat

SEQ ID NO: 671 - RNA, 21 nt, synthetic construct
  source 1..21: mol_type = other RNA
  modified_base 1: mod_base = OTHER; note = 2'-O-methylguanosine-3'-phosphorothioate
  modified_base 2: mod_base = OTHER; note = 2'-O-methyladenosine-3'-phosphorothioate
  modified_base 3: mod_base = OTHER; note = 2'-O-methyladenosine-3'-phosphate
  modified_base 4: mod_base = OTHER; note = 2'-O-methyladenosine-3'-phosphate
  modified_base 5: mod_base = OTHER; note = 2'-O-methylguanosine-3'-phosphate
  modified_base 6: mod_base = OTHER; note = 2'-O-methyluridine-3'-phosphate
  modified_base 7: mod_base = OTHER; note = 2'-deoxy-2'-fluoroadenosine-3'-phosphate
  modified_base 8: mod_base = OTHER; note = 2'-O-methylcytidine-3'-phosphate
  modified_base 9: mod_base = OTHER; note = 2'-deoxy-2'-fluoroadenosine-3'-phosphate
  modified_base 10: mod_base = OTHER; note = 2'-deoxy-2'-fluoroadenosine-3'-phosphate
  modified_base 11: mod_base = OTHER; note = 2'-deoxy-2'-fluoroadenosine-3'-phosphate
  modified_base 12: mod_base = OTHER; note = 2'-O-methylguanosine-3'-phosphate
  modified_base 13: mod_base = OTHER; note = 2'-O-methyladenosine-3'-phosphate
  modified_base 14: mod_base = OTHER; note = 2'-O-methylcytidine-3'-phosphate
  modified_base 15: mod_base = OTHER; note = 2'-O-methyladenosine-3'-phosphate
  modified_base 16: mod_base = OTHER; note = 2'-O-methylguanosine-3'-phosphate
  modified_base 17: mod_base = OTHER; note = 2'-O-methylguanosine-3'-phosphate
  modified_base 18: mod_base = OTHER; note = 2'-O-methyladenosine-3'-phosphate
  modified_base 19: mod_base = OTHER; note = 2'-O-methyladenosine-3'-phosphate
  modified_base 20: mod_base = OTHER; note = 2'-O-methyladenosine-3'-phosphate
  modified_base 21: mod_base = OTHER; note = 2'-O-methyluridine-3'-phosphate ((2S,4R)-1-[29-[[2-(acetylamino)-2-deoxy-beta-D-galactopyra nosyl]oxy]-14,14-bis[[3-[[3-[[5-[[2-(acetylamino)-2-deoxy-b eta-D-galactopyranosyl]oxy]-1-oxopentyl]amino]propyl]amino] -3-oxopropoxy]methyl]-1,12,19,25-tetraoxo-16-oxa-13,20,24-t riazanonacos-1-yl]-4-hydroxy-2-pyrrolidinyl)methyl ester
gaaagtacaaagacaggaaat

SEQ ID NO: 672 - RNA, 21 nt, synthetic construct
  source 1..21: mol_type = other RNA
  modified_base 1: mod_base = OTHER; note = 2'-O-methyladenosine-3'-phosphorothioate
  modified_base 2: mod_base = OTHER; note = 2'-O-methyladenosine-3'-phosphorothioate
  modified_base 3: mod_base = OTHER; note = 2'-O-methyladenosine-3'-phosphate
  modified_base 4: mod_base = OTHER; note = 2'-O-methylguanosine-3'-phosphate
  modified_base 5: mod_base = OTHER; note = 2'-O-methyluridine-3'-phosphate
  modified_base 6: mod_base = OTHER; note = 2'-O-methyladenosine-3'-phosphate
  modified_base 7: mod_base = OTHER; note = 2'-deoxy-2'-fluorocytidine-3'-phosphate
  modified_base 8: mod_base = OTHER; note = 2'-O-methyladenosine-3'-phosphate
  modified_base 9: mod_base = OTHER; note = 2'-deoxy-2'-fluoroadenosine-3'-phosphate
  modified_base 10: mod_base = OTHER; note = 2'-deoxy-2'-fluoroadenosine-3'-phosphate
  modified_base 11: mod_base = OTHER; note = 2'-deoxy-2'-fluoroguanosine-3'-phosphate
  modified_base 12: mod_base = OTHER; note = 2'-O-methyladenosine-3'-phosphate
  modified_base 13: mod_base = OTHER; note = 2'-O-methylcytidine-3'-phosphate
  modified_base 14: mod_base = OTHER; note = 2'-O-methyladenosine-3'-phosphate
  modified_base 15: mod_base = OTHER; note = 2'-O-methylguanosine-3'-phosphate
  modified_base 16: mod_base = OTHER; note = 2'-O-methylguanosine-3'-phosphate
  modified_base 17: mod_base = OTHER; note = 2'-O-methyladenosine-3'-phosphate
  modified_base 18: mod_base = OTHER; note = 2'-O-methyladenosine-3'-phosphate
  modified_base 19: mod_base = OTHER; note = 2'-O-methyladenosine-3'-phosphate
  modified_base 20: mod_base = OTHER; note = 2'-O-methylcytidine-3'-phosphate
  modified_base 21: mod_base = OTHER; note = 2'-O-methyluridine-3'-phosphate ((2S,4R)-1-[29-[[2-(acetylamino)-2-deoxy-beta-D-galactopyra nosyl]oxy]-14,14-bis[[3-[[3-[[5-[[2-(acetylamino)-2-deoxy-b eta-D-galactopyranosyl]oxy]-1-oxopentyl]amino]propyl]amino] -3-oxopropoxy]methyl]-1,12,19,25-tetraoxo-16-oxa-13,20,24-t riazanonacos-1-yl]-4-hydroxy-2-pyrrolidinyl)methyl ester
aaagtacaaagacaggaaact

SEQ ID NO: 673 - RNA, 21 nt, synthetic construct
  source 1..21: mol_type = other RNA
  modified_base 1: mod_base = OTHER; note = 2'-O-methyladenosine-3'-phosphorothioate
  modified_base 2: mod_base = OTHER; note = 2'-O-methyladenosine-3'-phosphorothioate
  modified_base 3: mod_base = OTHER; note = 2'-O-methylguanosine-3'-phosphate
  modified_base 4: mod_base = OTHER; note = 2'-O-methyluridine-3'-phosphate
  modified_base 5: mod_base = OTHER; note = 2'-O-methyladenosine-3'-phosphate
  modified_base 6: mod_base = OTHER; note = 2'-O-methylcytidine-3'-phosphate
  modified_base 7: mod_base = OTHER; note = 2'-deoxy-2'-fluoroadenosine-3'-phosphate
  modified_base 8: mod_base = OTHER; note = 2'-O-methyladenosine-3'-phosphate
  modified_base 9: mod_base = OTHER; note = 2'-deoxy-2'-fluoroadenosine-3'-phosphate
  modified_base 10: mod_base = OTHER; note = 2'-deoxy-2'-fluoroguanosine-3'-phosphate
  modified_base 11: mod_base = OTHER; note = 2'-deoxy-2'-fluoroadenosine-3'-phosphate
  modified_base 12: mod_base = OTHER; note = 2'-O-methylcytidine-3'-phosphate
  modified_base 13: mod_base = OTHER; note = 2'-O-methyladenosine-3'-phosphate
  modified_base 14: mod_base = OTHER; note = 2'-O-methylguanosine-3'-phosphate
  modified_base 15: mod_base = OTHER; note = 2'-O-methylguanosine-3'-phosphate
  modified_base 16: mod_base = OTHER; note = 2'-O-methyladenosine-3'-phosphate
  modified_base 17: mod_base = OTHER; note = 2'-O-methyladenosine-3'-phosphate
  modified_base 18: mod_base = OTHER; note = 2'-O-methyladenosine-3'-phosphate
  modified_base 19: mod_base = OTHER; note = 2'-O-methylcytidine-3'-phosphate
  modified_base 20: mod_base = OTHER; note = 2'-O-methylguanosine-3'-phosphate
  modified_base 21: mod_base = OTHER; note = 2'-O-methyluridine-3'-phosphate ((2S,4R)-1-[29-[[2-(acetylamino)-2-deoxy-beta-D-galactopyra nosyl]oxy]-14,14-bis[[3-[[3-[[5-[[2-(acetylamino)-2-deoxy-b eta-D-galactopyranosyl]oxy]-1-oxopentyl]amino]propyl]amino] -3-oxopropoxy]methyl]-1,12,19,25-tetraoxo-16-oxa-13,20,24-t riazanonacos-1-yl]-4-hydroxy-2-pyrrolidinyl)methyl ester
aagtacaaagacaggaaacgt

SEQ ID NO: 674 - RNA, 21 nt, synthetic construct
  source 1..21: mol_type = other RNA
  modified_base 1: mod_base = OTHER; note = 2'-O-methyladenosine-3'-phosphorothioate
  modified_base 2: mod_base = OTHER; note = 2'-O-methylguanosine-3'-phosphorothioate
  modified_base 3: mod_base = OTHER; note = 2'-O-methyluridine-3'-phosphate
  modified_base 4: mod_base = OTHER; note = 2'-O-methyladenosine-3'-phosphate
  modified_base 5: mod_base = OTHER; note = 2'-O-methylcytidine-3'-phosphate
  modified_base 6: mod_base = OTHER; note = 2'-O-methyladenosine-3'-phosphate
  modified_base 7: mod_base = OTHER; note = 2'-deoxy-2'-fluoroadenosine-3'-phosphate
  modified_base 8: mod_base = OTHER; note = 2'-O-methyladenosine-3'-phosphate
  modified_base 9: mod_base = OTHER; note = 2'-deoxy-2'-fluoroguanosine-3'-phosphate
  modified_base 10: mod_base = OTHER; note = 2'-deoxy-2'-fluoroadenosine-3'-phosphate
  modified_base 11: mod_base = OTHER; note = 2'-deoxy-2'-fluorocytidine-3'-phosphate
  modified_base 12: mod_base = OTHER; note = 2'-O-methyladenosine-3'-phosphate
  modified_base 13: mod_base = OTHER; note = 2'-O-methylguanosine-3'-phosphate
  modified_base 14: mod_base = OTHER; note = 2'-O-methylguanosine-3'-phosphate
  modified_base 15: mod_base = OTHER; note = 2'-O-methyladenosine-3'-phosphate
  modified_base 16: mod_base = OTHER; note = 2'-O-methyladenosine-3'-phosphate
  modified_base 17: mod_base = OTHER; note = 2'-O-methyladenosine-3'-phosphate
  modified_base 18: mod_base = OTHER; note = 2'-O-methylcytidine-3'-phosphate
  modified_base 19: mod_base = OTHER; note = 2'-O-methylguanosine-3'-phosphate
  modified_base 20: mod_base = OTHER; note = 2'-O-methylcytidine-3'-phosphate
  modified_base 21: mod_base = OTHER; note = 2'-O-methyluridine-3'-phosphate ((2S,4R)-1-[29-[[2-(acetylamino)-2-deoxy-beta-D-galactopyra nosyl]oxy]-14,14-bis[[3-[[3-[[5-[[2-(acetylamino)-2-deoxy-b eta-D-galactopyranosyl]oxy]-1-oxopentyl]amino]propyl]amino] -3-oxopropoxy]methyl]-1,12,19,25-tetraoxo-16-oxa-13,20,24-t riazanonacos-1-yl]-4-hydroxy-2-pyrrolidinyl)methyl ester
agtacaaagacaggaaacgct

SEQ ID NO: 675 - RNA, 21 nt, synthetic construct
  source 1..21: mol_type = other RNA
  modified_base 1: mod_base = OTHER; note = 2'-O-methylguanosine-3'-phosphorothioate
  modified_base 2: mod_base = OTHER; note = 2'-O-methyluridine-3'-phosphorothioate
  modified_base 3: mod_base = OTHER; note = 2'-O-methyladenosine-3'-phosphate
  modified_base 4: mod_base = OTHER; note = 2'-O-methylcytidine-3'-phosphate
  modified_base 5: mod_base = OTHER; note = 2'-O-methyladenosine-3'-phosphate
  modified_base 6: mod_base = OTHER; note = 2'-O-methyladenosine-3'-phosphate
  modified_base 7: mod_base = OTHER; note = 2'-deoxy-2'-fluoroadenosine-3'-phosphate
  modified_base 8: mod_base = OTHER; note = 2'-O-methylguanosine-3'-phosphate
  modified_base 9: mod_base = OTHER; note = 2'-deoxy-2'-fluoroadenosine-3'-phosphate
  modified_base 10: mod_base = OTHER; note = 2'-deoxy-2'-fluorocytidine-3'-phosphate
  modified_base 11: mod_base = OTHER; note = 2'-deoxy-2'-fluoroadenosine-3'-phosphate
  modified_base 12: mod_base = OTHER; note = 2'-O-methylguanosine-3'-phosphate
  modified_base 13: mod_base = OTHER; note = 2'-O-methylguanosine-3'-phosphate
  modified_base 14: mod_base = OTHER; note = 2'-O-methyladenosine-3'-phosphate
  modified_base 15: mod_base = OTHER; note = 2'-O-methyladenosine-3'-phosphate
  modified_base 16: mod_base = OTHER; note = 2'-O-methyladenosine-3'-phosphate
  modified_base 17: mod_base = OTHER; note = 2'-O-methylcytidine-3'-phosphate
  modified_base 18: mod_base = OTHER; note = 2'-O-methylguanosine-3'-phosphate
  modified_base 19: mod_base = OTHER; note = 2'-O-methylcytidine-3'-phosphate
  modified_base 20: mod_base = OTHER; note = 2'-O-methyluridine-3'-phosphate
  modified_base 21: mod_base = OTHER; note = 2'-O-methyluridine-3'-phosphate ((2S,4R)-1-[29-[[2-(acetylamino)-2-deoxy-beta-D-galactopyra nosyl]oxy]-14,14-bis[[3-[[3-[[5-[[2-(acetylamino)-2-deoxy-b eta-D-galactopyranosyl]oxy]-1-oxopentyl]amino]propyl]amino] -3-oxopropoxy]methyl]-1,12,19,25-tetraoxo-16-oxa-13,20,24-t riazanonacos-1-yl]-4-hydroxy-2-pyrrolidinyl)methyl ester
gtacaaagacaggaaacgctt

SEQ ID NO: 676 - RNA, 21 nt, synthetic construct
  source 1..21: mol_type = other RNA
  modified_base 1: mod_base = OTHER; note = 2'-O-methyluridine-3'-phosphorothioate
  modified_base 2: mod_base = OTHER; note = 2'-O-methyladenosine-3'-phosphorothioate
  modified_base 3: mod_base = OTHER; note = 2'-O-methylcytidine-3'-phosphate
  modified_base 4: mod_base = OTHER; note = 2'-O-methyladenosine-3'-phosphate
  modified_base 5: mod_base = OTHER; note = 2'-O-methyladenosine-3'-phosphate
  modified_base 6: mod_base = OTHER; note = 2'-O-methyladenosine-3'-phosphate
  modified_base 7: mod_base = OTHER; note = 2'-deoxy-2'-fluoroguanosine-3'-phosphate
  modified_base 8: mod_base = OTHER; note = 2'-O-methyladenosine-3'-phosphate
  modified_base 9: mod_base = OTHER; note = 2'-deoxy-2'-fluorocytidine-3'-phosphate
  modified_base 10: mod_base = OTHER; note = 2'-deoxy-2'-fluoroadenosine-3'-phosphate
  modified_base 11: mod_base = OTHER; note = 2'-deoxy-2'-fluoroguanosine-3'-phosphate
  modified_base 12: mod_base = OTHER; note = 2'-O-methylguanosine-3'-phosphate
  modified_base 13: mod_base = OTHER; note = 2'-O-methyladenosine-3'-phosphate
  modified_base 14: mod_base = OTHER; note = 2'-O-methyladenosine-3'-phosphate
  modified_base 15: mod_base = OTHER; note = 2'-O-methyladenosine-3'-phosphate
  modified_base 16: mod_base = OTHER; note = 2'-O-methylcytidine-3'-phosphate
  modified_base 17: mod_base = OTHER; note = 2'-O-methylguanosine-3'-phosphate
  modified_base 18: mod_base = OTHER; note = 2'-O-methylcytidine-3'-phosphate
  modified_base 19: mod_base = OTHER; note = 2'-O-methyluridine-3'-phosphate
  modified_base 20: mod_base = OTHER; note = 2'-O-methylguanosine-3'-phosphate
  modified_base 21: mod_base = OTHER; note = 2'-O-methyluridine-3'-phosphate ((2S,4R)-1-[29-[[2-(acetylamino)-2-deoxy-beta-D-galactopyra nosyl]oxy]-14,14-bis[[3-[[3-[[5-[[2-(acetylamino)-2-deoxy-b eta-D-galactopyranosyl]oxy]-1-oxopentyl]amino]propyl]amino] -3-oxopropoxy]methyl]-1,12,19,25-tetraoxo-16-oxa-13,20,24-t riazanonacos-1-yl]-4-hydroxy-2-pyrrolidinyl)methyl ester
tacaaagacaggaaacgctgt

SEQ ID NO: 677 - RNA, 21 nt, synthetic construct
  source 1..21: mol_type = other RNA
  modified_base 1: mod_base = OTHER; note = 2'-O-methylcytidine-3'-phosphorothioate
  modified_base 2: mod_base = OTHER; note = 2'-O-methyladenosine-3'-phosphorothioate
  modified_base 3: mod_base = OTHER; note = 2'-O-methyladenosine-3'-phosphate
  modified_base 4: mod_base = OTHER; note = 2'-O-methyladenosine-3'-phosphate
  modified_base 5: mod_base = OTHER; note = 2'-O-methylguanosine-3'-phosphate
  modified_base 6: mod_base = OTHER; note = 2'-O-methyladenosine-3'-phosphate
  modified_base 7: mod_base = OTHER; note = 2'-deoxy-2'-fluorocytidine-3'-phosphate
  modified_base 8: mod_base = OTHER; note = 2'-O-methyladenosine-3'-phosphate
  modified_base 9: mod_base = OTHER; note = 2'-deoxy-2'-fluoroguanosine-3'-phosphate
  modified_base 10: mod_base = OTHER; note = 2'-deoxy-2'-fluoroguanosine-3'-phosphate
  modified_base 11: mod_base = OTHER; note = 2'-deoxy-2'-fluoroadenosine-3'-phosphate
  modified_base 12: mod_base = OTHER; note = 2'-O-methyladenosine-3'-phosphate
  modified_base 13: mod_base = OTHER; note = 2'-O-methyladenosine-3'-phosphate
  modified_base 14: mod_base = OTHER; note = 2'-O-methylcytidine-3'-phosphate
  modified_base 15: mod_base = OTHER; note = 2'-O-methylguanosine-3'-phosphate
  modified_base 16: mod_base = OTHER; note = 2'-O-methylcytidine-3'-phosphate
  modified_base 17: mod_base = OTHER; note = 2'-O-methyluridine-3'-phosphate
  modified_base 18: mod_base = OTHER; note = 2'-O-methylguanosine-3'-phosphate
  modified_base 19: mod_base = OTHER; note = 2'-O-methylguanosine-3'-phosphate
  modified_base 20: mod_base = OTHER; note = 2'-O-methyladenosine-3'-phosphate
  modified_base 21: mod_base = OTHER; note = 2'-O-methyladenosine-3'-phosphate ((2S,4R)-1-[29-[[2-(acetylamino)-2-deoxy-beta-D-galactopyra nosyl]oxy]-14,14-bis[[3-[[3-[[5-[[2-(acetylamino)-2-deoxy-b eta-D-galactopyranosyl]oxy]-1-oxopentyl]amino]propyl]amino] -3-oxopropoxy]methyl]-1,12,19,25-tetraoxo-16-oxa-13,20,24-t riazanonacos-1-yl]-4-hydroxy-2-pyrrolidinyl)methyl ester
caaagacaggaaacgctggaa

SEQ ID NO: 678 - RNA, 21 nt, synthetic construct
  source 1..21: mol_type = other RNA
  modified_base 1: mod_base = OTHER; note = 2'-O-methyluridine-3'-phosphorothioate
  modified_base 2: mod_base = OTHER; note = 2'-O-methylguanosine-3'-phosphorothioate
  modified_base 3: mod_base = OTHER; note = 2'-O-methylguanosine-3'-phosphate
  modified_base 4: mod_base = OTHER; note = 2'-O-methylcytidine-3'-phosphate
  modified_base 5: mod_base = OTHER; note = 2'-O-methyluridine-3'-phosphate
  modified_base 6: mod_base = OTHER; note = 2'-O-methyluridine-3'-phosphate
  modified_base 7: mod_base = OTHER; note = 2'-deoxy-2'-fluoroguanosine-3'-phosphate
  modified_base 8: mod_base = OTHER; note = 2'-O-methyluridine-3'-phosphate
  modified_base 9: mod_base = OTHER; note = 2'-deoxy-2'-fluoroguanosine-3'-phosphate
  modified_base 10: mod_base = OTHER; note = 2'-deoxy-2'-fluoroguanosine-3'-phosphate
  modified_base 11: mod_base = OTHER; note = 2'-deoxy-2'-fluorouridine-3'-phosphate
  modified_base 12: mod_base = OTHER; note = 2'-O-methylguanosine-3'-phosphate
  modified_base 13: mod_base = OTHER; note = 2'-O-methyluridine-3'-phosphate
  modified_base 14: mod_base = OTHER; note = 2'-O-methyladenosine-3'-phosphate
  modified_base 15: mod_base = OTHER; note = 2'-O-methyladenosine-3'-phosphate
  modified_base 16: mod_base = OTHER; note = 2'-O-methyluridine-3'-phosphate
  modified_base 17: mod_base = OTHER; note = 2'-O-methyluridine-3'-phosphate
  modified_base 18: mod_base = OTHER; note = 2'-O-methylguanosine-3'-phosphate
  modified_base 19: mod_base = OTHER; note = 2'-O-methylguanosine-3'-phosphate
  modified_base 20: mod_base = OTHER; note = 2'-O-methylguanosine-3'-phosphate
  modified_base 21: mod_base = OTHER; note = 2'-O-methyladenosine-3'-phosphate ((2S,4R)-1-[29-[[2-(acetylamino)-2-deoxy-beta-D-galactopyra nosyl]oxy]-14,14-bis[[3-[[3-[[5-[[2-(acetylamino)-2-deoxy-b eta-D-galactopyranosyl]oxy]-1-oxopentyl]amino]propyl]amino] -3-oxopropoxy]methyl]-1,12,19,25-tetraoxo-16-oxa-13,20,24-t riazanonacos-1-yl]-4-hydroxy-2-pyrrolidinyl)methyl ester
tggcttgtggtgtaattggga

SEQ ID NO: 679 - RNA, 21 nt, synthetic construct
  source 1..21: mol_type = other RNA
  modified_base 1: mod_base = OTHER; note = 2'-O-methylguanosine-3'-phosphorothioate
  modified_base 2: mod_base = OTHER; note = 2'-O-methylguanosine-3'-phosphorothioate
  modified_base 3: mod_base = OTHER; note = 2'-O-methylcytidine-3'-phosphate
  modified_base 4: mod_base = OTHER; note = 2'-O-methyluridine-3'-phosphate
  modified_base 5: mod_base = OTHER; note = 2'-O-methyluridine-3'-phosphate
  modified_base 6: mod_base = OTHER; note = 2'-O-methylguanosine-3'-phosphate
  modified_base 7: mod_base = OTHER; note = 2'-deoxy-2'-fluorouridine-3'-phosphate
  modified_base 8: mod_base = OTHER; note = 2'-O-methylguanosine-3'-phosphate
  modified_base 9: mod_base = OTHER; note = 2'-deoxy-2'-fluoroguanosine-3'-phosphate
  modified_base 10: mod_base = OTHER; note = 2'-deoxy-2'-fluorouridine-3'-phosphate
  modified_base 11: mod_base = OTHER; note = 2'-deoxy-2'-fluoroguanosine-3'-phosphate
  modified_base 12: mod_base = OTHER; note = 2'-O-methyluridine-3'-phosphate
  modified_base 13: mod_base = OTHER; note = 2'-O-methyladenosine-3'-phosphate
  modified_base 14: mod_base = OTHER; note = 2'-O-methyladenosine-3'-phosphate
  modified_base 15: mod_base = OTHER; note = 2'-O-methyluridine-3'-phosphate
  modified_base 16: mod_base = OTHER; note = 2'-O-methyluridine-3'-phosphate
  modified_base 17: mod_base = OTHER; note = 2'-O-methylguanosine-3'-phosphate
  modified_base 18: mod_base = OTHER; note = 2'-O-methylguanosine-3'-phosphate
  modified_base 19: mod_base = OTHER; note = 2'-O-methylguanosine-3'-phosphate
  modified_base 20: mod_base = OTHER; note = 2'-O-methyladenosine-3'-phosphate
  modified_base 21: mod_base = OTHER; note = 2'-O-methyluridine-3'-phosphate ((2S,4R)-1-[29-[[2-(acetylamino)-2-deoxy-beta-D-galactopyra nosyl]oxy]-14,14-bis[[3-[[3-[[5-[[2-(acetylamino)-2-deoxy-b eta-D-galactopyranosyl]oxy]-1-oxopentyl]amino]propyl]amino] -3-oxopropoxy]methyl]-1,12,19,25-tetraoxo-16-oxa-13,20,24-t riazanonacos-1-yl]-4-hydroxy-2-pyrrolidinyl)methyl ester
ggcttgtggtgtaattgggat

SEQ ID NO: 680 - RNA, 21 nt, synthetic construct
  source 1..21: mol_type = other RNA
  modified_base 1: mod_base = OTHER; note = 2'-O-methylguanosine-3'-phosphorothioate
  modified_base 2: mod_base = OTHER; note = 2'-O-methyluridine-3'-phosphorothioate
  modified_base 3: mod_base = OTHER; note = 2'-O-methylcytidine-3'-phosphate
  modified_base 4: mod_base = OTHER; note = 2'-O-methylguanosine-3'-phosphate
  modified_base 5: mod_base = OTHER; note = 2'-O-methyluridine-3'-phosphate
  modified_base 6: mod_base = OTHER; note = 2'-O-methyluridine-3'-phosphate
  modified_base 7: mod_base = OTHER; note = 2'-deoxy-2'-fluorouridine-3'-phosphate
  modified_base 8: mod_base = OTHER; note = 2'-O-methylguanosine-3'-phosphate
  modified_base 9: mod_base = OTHER; note = 2'-deoxy-2'-fluoroguanosine-3'-phosphate
  modified_base 10: mod_base = OTHER; note = 2'-deoxy-2'-fluorocytidine-3'-phosphate
  modified_base 11: mod_base = OTHER; note = 2'-deoxy-2'-fluorouridine-3'-phosphate
  modified_base 12: mod_base = OTHER; note = 2'-O-methyluridine-3'-phosphate
  modified_base 13: mod_base = OTHER; note = 2'-O-methylguanosine-3'-phosphate
  modified_base 14: mod_base = OTHER; note = 2'-O-methyluridine-3'-phosphate
  modified_base 15: mod_base = OTHER; note = 2'-O-methylguanosine-3'-phosphate
  modified_base 16: mod_base = OTHER; note = 2'-O-methylguanosine-3'-phosphate
  modified_base 17: mod_base = OTHER; note = 2'-O-methyluridine-3'-phosphate
  modified_base 18: mod_base = OTHER; note = 2'-O-methylguanosine-3'-phosphate
  modified_base 19: mod_base = OTHER; note = 2'-O-methyluridine-3'-phosphate
  modified_base 20: mod_base = OTHER; note = 2'-O-methyladenosine-3'-phosphate
  modified_base 21: mod_base = OTHER; note = 2'-O-methyladenosine-3'-phosphate ((2S,4R)-1-[29-[[2-(acetylamino)-2-deoxy-beta-D-galactopyra nosyl]oxy]-14,14-bis[[3-[[3-[[5-[[2-(acetylamino)-2-deoxy-b eta-D-galactopyranosyl]oxy]-1-oxopentyl]amino]propyl]amino] -3-oxopropoxy]methyl]-1,12,19,25-tetraoxo-16-oxa-13,20,24-t riazanonacos-1-yl]-4-hydroxy-2-pyrrolidinyl)methyl ester
gtcgtttggcttgtggtgtaa

SEQ ID NO: 681 - RNA, 21 nt, synthetic construct
  source 1..21: mol_type = other RNA
  modified_base 1: mod_base = OTHER; note = 2'-O-methyluridine-3'-phosphorothioate
  modified_base 2: mod_base = OTHER; note = 2'-O-methylcytidine-3'-phosphorothioate
  modified_base 3: mod_base = OTHER; note = 2'-O-methylguanosine-3'-phosphate
  modified_base 4: mod_base = OTHER; note = 2'-O-methyluridine-3'-phosphate
  modified_base 5: mod_base = OTHER; note = 2'-O-methyluridine-3'-phosphate
  modified_base 6: mod_base = OTHER; note = 2'-O-methyluridine-3'-phosphate
  modified_base 7: mod_base = OTHER; note = 2'-deoxy-2'-fluoroguanosine-3'-phosphate
  modified_base 8: mod_base = OTHER; note = 2'-O-methylguanosine-3'-phosphate
  modified_base 9: mod_base = OTHER; note = 2'-deoxy-2'-fluorocytidine-3'-phosphate
  modified_base 10: mod_base = OTHER; note = 2'-deoxy-2'-fluorouridine-3'-phosphate
  modified_base 11: mod_base = OTHER; note = 2'-deoxy-2'-fluorouridine-3'-phosphate
  modified_base 12: mod_base = OTHER; note = 2'-O-methylguanosine-3'-phosphate
  modified_base 13: mod_base = OTHER; note = 2'-O-methyluridine-3'-phosphate
  modified_base 14: mod_base = OTHER; note = 2'-O-methylguanosine-3'-phosphate
  modified_base 15: mod_base = OTHER; note = 2'-O-methylguanosine-3'-phosphate
  modified_base 16: mod_base = OTHER; note = 2'-O-methyluridine-3'-phosphate
  modified_base 17: mod_base = OTHER; note = 2'-O-methylguanosine-3'-phosphate
  modified_base 18: mod_base = OTHER; note = 2'-O-methyluridine-3'-phosphate
  modified_base 19: mod_base = OTHER; note = 2'-O-methyladenosine-3'-phosphate
  modified_base 20: mod_base = OTHER; note = 2'-O-methyladenosine-3'-phosphate
  modified_base 21: mod_base = OTHER; note = 2'-O-methyluridine-3'-phosphate ((2S,4R)-1-[29-[[2-(acetylamino)-2-deoxy-beta-D-galactopyra nosyl]oxy]-14,14-bis[[3-[[3-[[5-[[2-(acetylamino)-2-deoxy-b eta-D-galactopyranosyl]oxy]-1-oxopentyl]amino]propyl]amino] -3-oxopropoxy]methyl]-1,12,19,25-tetraoxo-16-oxa-13,20,24-t riazanonacos-1-yl]-4-hydroxy-2-pyrrolidinyl)methyl ester
tcgtttggcttgtggtgtaat

SEQ ID NO: 682 - RNA, 21 nt, synthetic construct
  source 1..21: mol_type = other RNA
  modified_base 1: mod_base = OTHER; note = 2'-O-methylcytidine-3'-phosphorothioate
  modified_base 2: mod_base = OTHER; note = 2'-O-methylguanosine-3'-phosphorothioate
  modified_base 3: mod_base = OTHER; note = 2'-O-methyluridine-3'-phosphate
  modified_base 4: mod_base = OTHER; note = 2'-O-methyluridine-3'-phosphate
  modified_base 5: mod_base = OTHER; note = 2'-O-methyluridine-3'-phosphate
  modified_base 6: mod_base = OTHER; note = 2'-O-methylguanosine-3'-phosphate
  modified_base 7: mod_base = OTHER; note = 2'-deoxy-2'-fluoroguanosine-3'-phosphate
  modified_base 8: mod_base = OTHER; note = 2'-O-methylcytidine-3'-phosphate
  modified_base 9: mod_base = OTHER; note = 2'-deoxy-2'-fluorouridine-3'-phosphate
  modified_base 10: mod_base = OTHER; note = 2'-deoxy-2'-fluorouridine-3'-phosphate
  modified_base 11: mod_base = OTHER; note = 2'-deoxy-2'-fluoroguanosine-3'-phosphate
  modified_base 12: mod_base = OTHER; note = 2'-O-methyluridine-3'-phosphate
  modified_base 13: mod_base = OTHER; note = 2'-O-methylguanosine-3'-phosphate
  modified_base 14: mod_base = OTHER; note = 2'-O-methylguanosine-3'-phosphate
  modified_base 15: mod_base = OTHER; note = 2'-O-methyluridine-3'-phosphate
  modified_base 16: mod_base = OTHER; note = 2'-O-methylguanosine-3'-phosphate
  modified_base 17: mod_base = OTHER; note = 2'-O-methyluridine-3'-phosphate
  modified_base 18: mod_base = OTHER; note = 2'-O-methyladenosine-3'-phosphate
  modified_base 19: mod_base = OTHER; note = 2'-O-methyladenosine-3'-phosphate
  modified_base 20: mod_base = OTHER; note = 2'-O-methyluridine-3'-phosphate
  modified_base 21: mod_base = OTHER; note = 2'-O-methyluridine-3'-phosphate ((2S,4R)-1-[29-[[2-(acetylamino)-2-deoxy-beta-D-galactopyra nosyl]oxy]-14,14-bis[[3-[[3-[[5-[[2-(acetylamino)-2-deoxy-b eta-D-galactopyranosyl]oxy]-1-oxopentyl]amino]propyl]amino] -3-oxopropoxy]methyl]-1,12,19,25-tetraoxo-16-oxa-13,20,24-t riazanonacos-1-yl]-4-hydroxy-2-pyrrolidinyl)methyl ester
cgtttggcttgtggtgtaatt

SEQ ID NO: 683 - RNA, 21 nt, synthetic construct
  source 1..21: mol_type = other RNA
  modified_base 1: mod_base = OTHER; note = 2'-O-methylguanosine-3'-phosphorothioate
  modified_base 2: mod_base = OTHER; note = 2'-O-methyluridine-3'-phosphorothioate
  modified_base 3: mod_base = OTHER; note = 2'-O-methyluridine-3'-phosphate
  modified_base 4: mod_base = OTHER; note = 2'-O-methyluridine-3'-phosphate
  modified_base 5: mod_base = OTHER; note = 2'-O-methylguanosine-3'-phosphate
  modified_base 6: mod_base = OTHER; note = 2'-O-methylguanosine-3'-phosphate
  modified_base 7: mod_base = OTHER; note = 2'-deoxy-2'-fluorocytidine-3'-phosphate
  modified_base 8: mod_base = OTHER; note = 2'-O-methyluridine-3'-phosphate
  modified_base 9: mod_base = OTHER; note = 2'-deoxy-2'-fluorouridine-3'-phosphate
  modified_base 10: mod_base = OTHER; note = 2'-deoxy-2'-fluoroguanosine-3'-phosphate
  modified_base 11: mod_base = OTHER; note = 2'-deoxy-2'-fluorouridine-3'-phosphate
  modified_base 12: mod_base = OTHER; note = 2'-O-methylguanosine-3'-phosphate
  modified_base 13: mod_base = OTHER; note = 2'-O-methylguanosine-3'-phosphate
  modified_base 14: mod_base = OTHER; note = 2'-O-methyluridine-3'-phosphate
  modified_base 15: mod_base = OTHER; note = 2'-O-methylguanosine-3'-phosphate
  modified_base 16: mod_base = OTHER; note = 2'-O-methyluridine-3'-phosphate
  modified_base 17: mod_base = OTHER; note = 2'-O-methyladenosine-3'-phosphate
  modified_base 18: mod_base = OTHER; note = 2'-O-methyladenosine-3'-phosphate
  modified_base 19: mod_base = OTHER; note = 2'-O-methyluridine-3'-phosphate
  modified_base 20: mod_base = OTHER; note = 2'-O-methyluridine-3'-phosphate
  modified_base 21: mod_base = OTHER; note = 2'-O-methyluridine-3'-phosphate ((2S,4R)-1-[29-[[2-(acetylamino)-2-deoxy-beta-D-galactopyra nosyl]oxy]-14,14-bis[[3-[[3-[[5-[[2-(acetylamino)-2-deoxy-b eta-D-galactopyranosyl]oxy]-1-oxopentyl]amino]propyl]amino] -3-oxopropoxy]methyl]-1,12,19,25-tetraoxo-16-oxa-13,20,24-t riazanonacos-1-yl]-4-hydroxy-2-pyrrolidinyl)methyl ester
gtttggcttgtggtgtaattt

SEQ ID NO: 684 - RNA, 21 nt, synthetic construct
  source 1..21: mol_type = other RNA
  modified_base 1: mod_base = OTHER; note = 2'-O-methyluridine-3'-phosphorothioate
  modified_base 2: mod_base = OTHER; note = 2'-O-methyluridine-3'-phosphorothioate
  modified_base 3: mod_base = OTHER; note = 2'-O-methyluridine-3'-phosphate
  modified_base 4: mod_base = OTHER; note = 2'-O-methylguanosine-3'-phosphate
  modified_base 5: mod_base = OTHER; note = 2'-O-methylguanosine-3'-phosphate
  modified_base 6: mod_base = OTHER; note = 2'-O-methylcytidine-3'-phosphate
  modified_base 7: mod_base = OTHER; note = 2'-deoxy-2'-fluorouridine-3'-phosphate
  modified_base 8: mod_base = OTHER; note = 2'-O-methyluridine-3'-phosphate
  modified_base 9: mod_base = OTHER; note = 2'-deoxy-2'-fluoroguanosine-3'-phosphate
  modified_base 10: mod_base = OTHER; note = 2'-deoxy-2'-fluorouridine-3'-phosphate
  modified_base 11: mod_base = OTHER; note = 2'-deoxy-2'-fluoroguanosine-3'-phosphate
  modified_base 12: mod_base = OTHER; note = 2'-O-methylguanosine-3'-phosphate
  modified_base 13: mod_base = OTHER; note = 2'-O-methyluridine-3'-phosphate
  modified_base 14: mod_base = OTHER; note = 2'-O-methylguanosine-3'-phosphate
  modified_base 15: mod_base = OTHER; note = 2'-O-methyluridine-3'-phosphate
  modified_base 16: mod_base = OTHER; note = 2'-O-methyladenosine-3'-phosphate
  modified_base 17: mod_base = OTHER; note = 2'-O-methyladenosine-3'-phosphate
  modified_base 18: mod_base = OTHER; note = 2'-O-methyluridine-3'-phosphate
  modified_base 19: mod_base = OTHER; note = 2'-O-methyluridine-3'-phosphate
  modified_base 20: mod_base = OTHER; note = 2'-O-methylguanosine-3'-phosphate
  modified_base 21: mod_base = OTHER; note = 2'-O-methyluridine-3'-phosphate ((2S,4R)-1-[29-[[2-(acetylamino)-2-deoxy-beta-D-galactopyra nosyl]oxy]-14,14-bis[[3-[[3-[[5-[[2-(acetylamino)-2-deoxy-b eta-D-galactopyranosyl]oxy]-1-oxopentyl]amino]propyl]amino] -3-oxopropoxy]methyl]-1,12,19,25-tetraoxo-16-oxa-13,20,24-t riazanonacos-1-yl]-4-hydroxy-2-pyrrolidinyl)methyl ester
tttggcttgtggtgtaattgt

SEQ ID NO: 685 - RNA, 21 nt, synthetic construct
  source 1..21: mol_type = other RNA
  modified_base 1: mod_base = OTHER; note = 2'-O-methyluridine-3'-phosphorothioate
  modified_base 2: mod_base = OTHER; note = 2'-O-methyluridine-3'-phosphorothioate
  modified_base 3: mod_base = OTHER; note = 2'-O-methylguanosine-3'-phosphate
  modified_base 4: mod_base = OTHER; note = 2'-O-methylguanosine-3'-phosphate
  modified_base 5: mod_base = OTHER; note = 2'-O-methylcytidine-3'-phosphate
  modified_base 6: mod_base = OTHER; note = 2'-O-methyluridine-3'-phosphate
  modified_base 7: mod_base = OTHER; note = 2'-deoxy-2'-fluorouridine-3'-phosphate
  modified_base 8: mod_base = OTHER; note = 2'-O-methylguanosine-3'-phosphate
  modified_base 9: mod_base = OTHER; note = 2'-deoxy-2'-fluorouridine-3'-phosphate
  modified_base 10: mod_base = OTHER; note = 2'-deoxy-2'-fluoroguanosine-3'-phosphate
  modified_base 11: mod_base = OTHER; note = 2'-deoxy-2'-fluoroguanosine-3'-phosphate
  modified_base 12: mod_base = OTHER; note = 2'-O-methyluridine-3'-phosphate
  modified_base 13: mod_base = OTHER; note = 2'-O-methylguanosine-3'-phosphate
  modified_base 14: mod_base = OTHER; note = 2'-O-methyluridine-3'-phosphate
  modified_base 15: mod_base = OTHER; note = 2'-O-methyladenosine-3'-phosphate
  modified_base 16: mod_base = OTHER; note = 2'-O-methyladenosine-3'-phosphate
  modified_base 17: mod_base = OTHER; note = 2'-O-methyluridine-3'-phosphate
  modified_base 18: mod_base = OTHER; note = 2'-O-methyluridine-3'-phosphate
  modified_base 19: mod_base = OTHER; note = 2'-O-methylguanosine-3'-phosphate
  modified_base 20: mod_base = OTHER; note = 2'-O-methylguanosine-3'-phosphate
  modified_base 21: mod_base = OTHER; note = 2'-O-methyluridine-3'-phosphate ((2S,4R)-1-[29-[[2-(acetylamino)-2-deoxy-beta-D-galactopyra nosyl]oxy]-14,14-bis[[3-[[3-[[5-[[2-(acetylamino)-2-deoxy-b eta-D-galactopyranosyl]oxy]-1-oxopentyl]amino]propyl]amino] -3-oxopropoxy]methyl]-1,12,19,25-tetraoxo-16-oxa-13,20,24-t riazanonacos-1-yl]-4-hydroxy-2-pyrrolidinyl)methyl ester
ttggcttgtggtgtaattggt

SEQ ID NO: 686 - RNA, 21 nt, synthetic construct
  source 1..21: mol_type = other RNA
  modified_base 1: mod_base = OTHER; note = 2'-O-methylguanosine-3'-phosphorothioate
  modified_base 2: mod_base = OTHER; note = 2'-O-methyluridine-3'-phosphorothioate
  modified_base 3: mod_base = OTHER; note = 2'-O-methyladenosine-3'-phosphate
  modified_base 4: mod_base = OTHER; note = 2'-O-methyladenosine-3'-phosphate
  modified_base 5: mod_base = OTHER; note = 2'-O-methyluridine-3'-phosphate
  modified_base 6: mod_base = OTHER; note = 2'-O-methyluridine-3'-phosphate
  modified_base 7: mod_base = OTHER; note = 2'-deoxy-2'-fluoroguanosine-3'-phosphate
  modified_base 8: mod_base = OTHER; note = 2'-O-methylguanosine-3'-phosphate
  modified_base 9: mod_base = OTHER; note = 2'-deoxy-2'-fluoroguanosine-3'-phosphate
  modified_base 10: mod_base = OTHER; note = 2'-deoxy-2'-fluoroadenosine-3'-phosphate
  modified_base 11: mod_base = OTHER; note = 2'-deoxy-2'-fluorouridine-3'-phosphate
  modified_base 12: mod_base = OTHER; note = 2'-O-methylcytidine-3'-phosphate
  modified_base 13: mod_base = OTHER; note = 2'-O-methylguanosine-3'-phosphate
  modified_base 14: mod_base = OTHER; note = 2'-O-methylcytidine-3'-phosphate
  modified_base 15: mod_base = OTHER; note = 2'-O-methylcytidine-3'-phosphate
  modified_base 16: mod_base = OTHER; note = 2'-O-methylcytidine-3'-phosphate
  modified_base 17: mod_base = OTHER; note = 2'-O-methyladenosine-3'-phosphate
  modified_base 18: mod_base = OTHER; note = 2'-O-methyladenosine-3'-phosphate
  modified_base 19: mod_base = OTHER; note = 2'-O-methyluridine-3'-phosphate
  modified_base 20: mod_base = OTHER; note = 2'-O-methyladenosine-3'-phosphate
  modified_base 21: mod_base = OTHER; note = 2'-O-methyladenosine-3'-phosphate ((2S,4R)-1-[29-[[2-(acetylamino)-2-deoxy-beta-D-galactopyra nosyl]oxy]-14,14-bis[[3-[[3-[[5-[[2-(acetylamino)-2-deoxy-b eta-D-galactopyranosyl]oxy]-1-oxopentyl]amino]propyl]amino] -3-oxopropoxy]methyl]-1,12,19,25-tetraoxo-16-oxa-13,20,24-t riazanonacos-1-yl]-4-hydroxy-2-pyrrolidinyl)methyl ester
gtaattgggatcgcccaataa

SEQ ID NO: 687 - RNA, 23 nt, synthetic construct
  source 1..23: mol_type = other RNA
  modified_base 1: mod_base = OTHER; note = 2'-O-methyluridine-3'-phosphorothioate
  modified_base 2: mod_base = OTHER; note = 2'-deoxy-2'-fluorouridine-3'-phosphorothioate
  modified_base 3: mod_base = OTHER; note = 2'-O-methylcytidine-3'-phosphate
  modified_base 4: mod_base = OTHER; note = 2'-O-methylcytidine-3'-phosphate
  modified_base 5: mod_base = OTHER; note = 2'-O-methyladenosine-3'-phosphate
  modified_base 6: mod_base = OTHER; note = 2'-deoxy-2'-fluorocytidine-3'-phosphate
  modified_base 7: mod_base = OTHER; note = 2'-O-methylcytidine-3'-phosphate
  modified_base 8: mod_base = OTHER; note = 2'-deoxy-2'-fluorouridine-3'-phosphate
  modified_base 9: mod_base = OTHER; note = 2'-deoxy-2'-fluorouridine-3'-phosphate
  modified_base 10: mod_base = OTHER; note = 2'-O-methyluridine-3'-phosphate
  modified_base 11: mod_base = OTHER; note = 2'-O-methylguanosine-3'-phosphate
  modified_base 12: mod_base = OTHER; note = 2'-O-methylcytidine-3'-phosphate
  modified_base 13: mod_base = OTHER; note = 2'-O-methylcytidine-3'-phosphate
  modified_base 14: mod_base = OTHER; note = 2'-deoxy-2'-fluorocytidine-3'-phosphate
  modified_base 15: mod_base = OTHER; note = 2'-O-methyladenosine-3'-phosphate
  modified_base 16: mod_base = OTHER; note = 2'-deoxy-2'-fluoroadenosine-3'-phosphate
  modified_base 17: mod_base = OTHER; note = 2'-O-methylguanosine-3'-phosphate
  modified_base 18: mod_base = OTHER; note = 2'-O-methyluridine-3'-phosphate
  modified_base 19: mod_base = OTHER; note = 2'-O-methylcytidine-3'-phosphate
  modified_base 20: mod_base = OTHER; note = 2'-O-methyladenosine-3'-phosphate
  modified_base 21: mod_base = OTHER; note = 2'-O-methyluridine-3'-phosphorothioate
  modified_base 22: mod_base = OTHER; note = 2'-O-methylcytidine-3'-phosphorothioate
  modified_base 23: mod_base = OTHER; note = 2'-O-methyluridine
ttccacctttgcccaagtcatct

SEQ ID NO: 688 - RNA, 23 nt, synthetic construct
  source 1..23: mol_type = other RNA
  modified_base 1: mod_base = OTHER; note = 2'-O-methyluridine-3'-phosphorothioate
  modified_base 2: mod_base = OTHER; note = 2'-deoxy-2'-fluorouridine-3'-phosphorothioate
  modified_base 3: mod_base = OTHER; note = 2'-O-methyluridine-3'-phosphate
  modified_base 4: mod_base = OTHER; note = 2'-O-methylcytidine-3'-phosphate
  modified_base 5: mod_base = OTHER; note = 2'-O-methylcytidine-3'-phosphate
  modified_base 6: mod_base = OTHER; note = 2'-deoxy-2'-fluoroadenosine-3'-phosphate
  modified_base 7: mod_base = OTHER; note = 2'-O-methylcytidine-3'-phosphate
  modified_base 8: mod_base = OTHER; note = 2'-deoxy-2'-fluorocytidine-3'-phosphate
  modified_base 9: mod_base = OTHER; note = 2'-deoxy-2'-fluorouridine-3'-phosphate
  modified_base 10: mod_base = OTHER; note = 2'-O-methyluridine-3'-phosphate
  modified_base 11: mod_base = OTHER; note = 2'-O-methyluridine-3'-phosphate
  modified_base 12: mod_base = OTHER; note = 2'-O-methylguanosine-3'-phosphate
  modified_base 13: mod_base = OTHER; note = 2'-O-methylcytidine-3'-phosphate
  modified_base 14: mod_base = OTHER; note = 2'-deoxy-2'-fluorocytidine-3'-phosphate
  modified_base 15: mod_base = OTHER; note = 2'-O-methylcytidine-3'-phosphate
  modified_base 16: mod_base = OTHER; note = 2'-deoxy-2'-fluoroadenosine-3'-phosphate
  modified_base 17: mod_base = OTHER; note = 2'-O-methyladenosine-3'-phosphate
  modified_base 18: mod_base = OTHER; note = 2'-O-methylguanosine-3'-phosphate
  modified_base 19: mod_base = OTHER; note = 2'-O-methyluridine-3'-phosphate
  modified_base 20: mod_base = OTHER; note = 2'-O-methylcytidine-3'-phosphate
  modified_base 21: mod_base = OTHER; note = 2'-O-methyladenosine-3'-phosphorothioate
  modified_base 22: mod_base = OTHER; note = 2'-O-methyluridine-3'-phosphorothioate
  modified_base 23: mod_base = OTHER; note = 2'-O-methylcytidine
tttccacctttgcccaagtcatc

SEQ ID NO: 689 - RNA, 23 nt, synthetic construct
  source 1..23: mol_type = other RNA
  modified_base 1: mod_base = OTHER; note = 2'-O-methyladenosine-3'-phosphorothioate
  modified_base 2: mod_base = OTHER; note = 2'-deoxy-2'-fluorouridine-3'-phosphorothioate
  modified_base 3: mod_base = OTHER; note = 2'-O-methyluridine-3'-phosphate
  modified_base 4: mod_base = OTHER; note = 2'-O-methyluridine-3'-phosphate
  modified_base 5: mod_base = OTHER; note = 2'-O-methylcytidine-3'-phosphate
  modified_base 6: mod_base = OTHER; note = 2'-deoxy-2'-fluorocytidine-3'-phosphate
  modified_base 7: mod_base = OTHER; note = 2'-O-methyladenosine-3'-phosphate
  modified_base 8: mod_base = OTHER; note = 2'-deoxy-2'-fluorocytidine-3'-phosphate
  modified_base 9: mod_base = OTHER; note = 2'-deoxy-2'-fluorocytidine-3'-phosphate
  modified_base 10: mod_base = OTHER; note = 2'-O-methyluridine-3'-phosphate
  modified_base 11: mod_base = OTHER; note = 2'-O-methyluridine-3'-phosphate
  modified_base 12: mod_base = OTHER; note = 2'-O-methyluridine-3'-phosphate
  modified_base 13: mod_base = OTHER; note = 2'-O-methylguanosine-3'-phosphate
  modified_base 14: mod_base = OTHER; note = 2'-deoxy-2'-fluorocytidine-3'-phosphate
  modified_base 15: mod_base = OTHER; note = 2'-O-methylcytidine-3'-phosphate
  modified_base 16: mod_base = OTHER; note = 2'-deoxy-2'-fluorocytidine-3'-phosphate
  modified_base 17: mod_base = OTHER; note = 2'-O-methyladenosine-3'-phosphate
  modified_base 18: mod_base = OTHER; note = 2'-O-methyladenosine-3'-phosphate
  modified_base 19: mod_base = OTHER; note = 2'-O-methylguanosine-3'-phosphate
  modified_base 20: mod_base = OTHER; note = 2'-O-methyluridine-3'-phosphate
  modified_base 21: mod_base = OTHER; note = 2'-O-methylcytidine-3'-phosphorothioate
  modified_base 22: mod_base = OTHER; note = 2'-O-methyladenosine-3'-phosphorothioate
  modified_base 23: mod_base = OTHER; note = 2'-O-methyluridine
atttccacctttgcccaagtcat

SEQ ID NO: 690 - RNA, 23 nt, synthetic construct
  source 1..23: mol_type = other RNA
  modified_base 1: mod_base = OTHER; note = 2'-O-methyluridine-3'-phosphorothioate
  modified_base 2: mod_base = OTHER; note = 2'-deoxy-2'-fluoroadenosine-3'-phosphorothioate
  modified_base 3: mod_base = OTHER; note = 2'-O-methylcytidine-3'-phosphate
  modified_base 4: mod_base = OTHER; note = 2'-O-methyluridine-3'-phosphate
  modified_base 5: mod_base = OTHER; note = 2'-O-methyluridine-3'-phosphate
  modified_base 6: mod_base = OTHER; note = 2'-deoxy-2'-fluorouridine-3'-phosphate
  modified_base 7: mod_base = OTHER; note = 2'-O-methylcytidine-3'-phosphate
  modified_base 8: mod_base = OTHER; note = 2'-deoxy-2'-fluorouridine-3'-phosphate
  modified_base 9: mod_base = OTHER; note = 2'-deoxy-2'-fluorouridine-3'-phosphate
  modified_base 10: mod_base = OTHER; note = 2'-O-methylcytidine-3'-phosphate
  modified_base 11: mod_base = OTHER; note = 2'-O-methyladenosine-3'-phosphate
  modified_base 12: mod_base = OTHER; note = 2'-O-methyluridine-3'-phosphate
  modified_base 13: mod_base = OTHER; note = 2'-O-methyluridine-3'-phosphate
  modified_base 14: mod_base = OTHER; note = 2'-deoxy-2'-fluorouridine-3'-phosphate
  modified_base 15: mod_base = OTHER; note = 2'-O-methylcytidine-3'-phosphate
  modified_base 16: mod_base = OTHER; note = 2'-deoxy-2'-fluorocytidine-3'-phosphate
  modified_base 17: mod_base = OTHER; note = 2'-O-methyladenosine-3'-phosphate
  modified_base 18: mod_base = OTHER; note = 2'-O-methylcytidine-3'-phosphate
  modified_base 19: mod_base = OTHER; note = 2'-O-methylcytidine-3'-phosphate
  modified_base 20: mod_base = OTHER; note = 2'-O-methyluridine-3'-phosphate
  modified_base 21: mod_base = OTHER; note = 2'-O-methyluridine-3'-phosphorothioate
  modified_base 22: mod_base = OTHER; note = 2'-O-methyluridine-3'-phosphorothioate
  modified_base 23: mod_base = OTHER; note = 2'-O-methylguanosine
tactttcttcatttccacctttg

SEQ ID NO: 691 - RNA, 23 nt, synthetic construct
  source 1..23: mol_type = other RNA
  modified_base 1: mod_base = OTHER; note = 2'-O-methyladenosine-3'-phosphorothioate
  modified_base 2: mod_base = OTHER; note = 2'-deoxy-2'-fluorocytidine-3'-phosphorothioate
  modified_base 3: mod_base = OTHER; note = 2'-O-methyluridine-3'-phosphate
  modified_base 4: mod_base = OTHER; note = 2'-O-methyluridine-3'-phosphate
  modified_base 5: mod_base = OTHER; note = 2'-O-methyluridine-3'-phosphate
  modified_base 6: mod_base = OTHER; note = 2'-deoxy-2'-fluorocytidine-3'-phosphate
  modified_base 7: mod_base = OTHER; note = 2'-O-methylcytidine-3'-phosphate
  modified_base 8: mod_base = OTHER; note = 2'-deoxy-2'-fluorouridine-3'-phosphate
  modified_base 9: mod_base = OTHER; note = 2'-deoxy-2'-fluorouridine-3'-phosphate
  modified_base 10: mod_base = OTHER; note = 2'-O-methylcytidine-3'-phosphate
  modified_base 11: mod_base = OTHER; note = 2'-O-methyluridine-3'-phosphate
  modified_base 12: mod_base = OTHER; note = 2'-O-methylguanosine-3'-phosphate
  modified_base 13: mod_base = OTHER; note = 2'-O-methylcytidine-3'-phosphate
  modified_base 14: mod_base = OTHER; note = 2'-deoxy-2'-fluorouridine-3'-phosphate
  modified_base 15: mod_base = OTHER; note = 2'-O-methylcytidine-3'-phosphate
  modified_base 16: mod_base = OTHER; note = 2'-deoxy-2'-fluoroguanosine-3'-phosphate
  modified_base 17: mod_base = OTHER; note = 2'-O-methyladenosine-3'-phosphate
  modified_base 18: mod_base = OTHER; note = 2'-O-methyladenosine-3'-phosphate
  modified_base 19: mod_base = OTHER; note = 2'-O-methyladenosine-3'-phosphate
  modified_base 20: mod_base = OTHER; note = 2'-O-methyluridine-3'-phosphate
  modified_base 21: mod_base = OTHER; note = 2'-O-methyluridine-3'-phosphorothioate
  modified_base 22: mod_base = OTHER; note = 2'-O-methylguanosine-3'-phosphorothioate
  modified_base 23: mod_base = OTHER; note = 2'-O-methyladenosine
actttccttctgctcgaaattga

SEQ ID NO: 692 - RNA, 23 nt, synthetic construct
  source 1..23: mol_type = other RNA
  modified_base 1: mod_base = OTHER; note = 2'-O-methyluridine-3'-phosphorothioate
  modified_base 2: mod_base = OTHER; note = 2'-deoxy-2'-fluorocytidine-3'-phosphorothioate
  modified_base 3: mod_base = OTHER; note = 2'-O-methylcytidine-3'-phosphate
  modified_base 4: mod_base = OTHER; note = 2'-O-methyladenosine-3'-phosphate
  modified_base 5: mod_base = OTHER; note = 2'-O-methyluridine-3'-phosphate
  modified_base 6: mod_base = OTHER; note = 2'-deoxy-2'-fluorouridine-3'-phosphate
  modified_base 7: mod_base = OTHER; note = 2'-O-methyladenosine-3'-phosphate
  modified_base 8: mod_base = OTHER; note = 2'-deoxy-2'-fluorocytidine-3'-phosphate
  modified_base 9: mod_base = OTHER; note = 2'-deoxy-2'-fluorouridine-3'-phosphate
  modified_base 10: mod_base = OTHER; note = 2'-O-methyluridine-3'-phosphate
  modified_base 11: mod_base = OTHER; note = 2'-O-methyluridine-3'-phosphate
  modified_base 12: mod_base = OTHER; note = 2'-O-methylcytidine-3'-phosphate
  modified_base 13: mod_base = OTHER; note = 2'-O-methylcytidine-3'-phosphate
  modified_base 14: mod_base = OTHER; note = 2'-deoxy-2'-fluorouridine-3'-phosphate
  modified_base 15: mod_base = OTHER; note = 2'-O-methyluridine-3'-phosphate
  modified_base 16: mod_base = OTHER; note = 2'-deoxy-2'-fluorocytidine-3'-phosphate
  modified_base 17: mod_base = OTHER; note = 2'-O-methyluridine-3'-phosphate
  modified_base 18: mod_base = OTHER; note = 2'-O-methylguanosine-3'-phosphate
  modified_base 19: mod_base = OTHER; note = 2'-O-methylcytidine-3'-phosphate
  modified_base 20: mod_base = OTHER; note = 2'-O-methyluridine-3'-phosphate
  modified_base 21: mod_base = OTHER; note = 2'-O-methylcytidine-3'-phosphorothioate
  modified_base 22: mod_base = OTHER; note = 2'-O-methylguanosine-3'-phosphorothioate
  modified_base 23: mod_base = OTHER; note = 2'-O-methyladenosine
tccattactttccttctgctcga

SEQ ID NO: 693 - RNA, 23 nt, synthetic construct
  source 1..23: mol_type = other RNA
  modified_base 1: mod_base = OTHER; note = 2'-O-methyladenosine-3'-phosphorothioate
  modified_base 2: mod_base = OTHER; note = 2'-deoxy-2'-fluorouridine-3'-phosphorothioate
  modified_base 3: mod_base = OTHER; note = 2'-O-methylguanosine-3'-phosphate
  modified_base 4: mod_base = OTHER; note = 2'-O-methylguanosine-3'-phosphate
  modified_base 5: mod_base = OTHER; note = 2'-O-methyluridine-3'-phosphate
  modified_base 6: mod_base = OTHER; note = 2'-deoxy-2'-fluorocytidine-3'-phosphate
  modified_base 7: mod_base = OTHER; note = 2'-O-methylcytidine-3'-phosphate
  modified_base 8: mod_base = OTHER; note = 2'-deoxy-2'-fluoroadenosine-3'-phosphate
  modified_base 9: mod_base = OTHER; note = 2'-deoxy-2'-fluorouridine-3'-phosphate
  modified_base 10: mod_base = OTHER; note = 2'-O-methyluridine-3'-phosphate
  modified_base 11: mod_base = OTHER; note = 2'-O-methyladenosine-3'-phosphate
  modified_base 12: mod_base = OTHER; note = 2'-O-methylcytidine-3'-phosphate
  modified_base 13: mod_base = OTHER; note = 2'-O-methyluridine-3'-phosphate
  modified_base 14: mod_base = OTHER; note = 2'-deoxy-2'-fluorouridine-3'-phosphate
  modified_base 15: mod_base = OTHER; note = 2'-O-methyluridine-3'-phosphate
  modified_base 16: mod_base = OTHER; note = 2'-deoxy-2'-fluorocytidine-3'-phosphate
  modified_base 17: mod_base = OTHER; note = 2'-O-methylcytidine-3'-phosphate
  modified_base 18: mod_base = OTHER; note = 2'-O-methyluridine-3'-phosphate
  modified_base 19: mod_base = OTHER; note = 2'-O-methyluridine-3'-phosphate
  modified_base 20: mod_base = OTHER; note = 2'-O-methylcytidine-3'-phosphate
  modified_base 21: mod_base = OTHER; note = 2'-O-methyluridine-3'-phosphorothioate
  modified_base 22: mod_base = OTHER; note = 2'-O-methylguanosine-3'-phosphorothioate
  modified_base 23: mod_base = OTHER; note = 2'-O-methylcytidine
atggtccattactttccttctgc

SEQ ID NO: 694 - RNA, 23 nt, synthetic construct
  source 1..23: mol_type = other RNA
  modified_base 1: mod_base = OTHER; note = 2'-O-methyladenosine-3'-phosphorothioate
  modified_base 2: mod_base = OTHER; note = 2'-deoxy-2'-fluorocytidine-3'-phosphorothioate
  modified_base 3: mod_base = OTHER; note = 2'-O-methyluridine-3'-phosphate
  modified_base 4: mod_base = OTHER; note = 2'-O-methylguanosine-3'-phosphate
  modified_base 5: mod_base = OTHER; note = 2'-O-methylguanosine-3'-phosphate
  modified_base 6: mod_base = OTHER; note = 2'-deoxy-2'-fluorouridine-3'-phosphate
  modified_base 7: mod_base = OTHER; note = 2'-O-methylcytidine-3'-phosphate
  modified_base 8: mod_base = OTHER; note = 2'-deoxy-2'-fluorocytidine-3'-phosphate
  modified_base 9: mod_base = OTHER; note = 2'-deoxy-2'-fluoroadenosine-3'-phosphate
  modified_base 10: mod_base = OTHER; note = 2'-O-methyluridine-3'-phosphate
  modified_base 11: mod_base = OTHER; note = 2'-O-methyluridine-3'-phosphate
  modified_base 12: mod_base = OTHER; note = 2'-O-methyladenosine-3'-phosphate
  modified_base 13: mod_base = OTHER; note = 2'-O-methylcytidine-3'-phosphate
  modified_base 14: mod_base = OTHER; note = 2'-deoxy-2'-fluorouridine-3'-phosphate
  modified_base 15: mod_base = OTHER; note = 2'-O-methyluridine-3'-phosphate
  modified_base 16: mod_base = OTHER; note = 2'-deoxy-2'-fluorouridine-3'-phosphate
  modified_base 17: mod_base = OTHER; note = 2'-O-methylcytidine-3'-phosphate
  modified_base 18: mod_base = OTHER; note = 2'-O-methylcytidine-3'-phosphate
  modified_base 19: mod_base = OTHER; note = 2'-O-methyluridine-3'-phosphate
  modified_base 20: mod_base = OTHER; note = 2'-O-methyluridine-3'-phosphate
  modified_base 21: mod_base = OTHER; note = 2'-O-methylcytidine-3'-phosphorothioate
  modified_base 22: mod_base = OTHER; note = 2'-O-methyluridine-3'-phosphorothioate
  modified_base 23: mod_base = OTHER; note = 2'-O-methylguanosine
actggtccattactttccttctg

SEQ ID NO: 695 - RNA, 23 nt, synthetic construct
  source 1..23: mol_type = other RNA
  modified_base 1: mod_base = OTHER; note = 2'-O-methyluridine-3'-phosphorothioate
  modified_base 2: mod_base = OTHER; note = 2'-deoxy-2'-fluorocytidine-3'-phosphorothioate
  modified_base 3: mod_base = OTHER; note = 2'-O-methyladenosine-3'-phosphate
  modified_base 4: mod_base = OTHER; note = 2'-O-methylcytidine-3'-phosphate
  modified_base 5: mod_base = OTHER; note = 2'-O-methyluridine-3'-phosphate
  modified_base 6: mod_base = OTHER; note = 2'-deoxy-2'-fluoroguanosine-3'-phosphate
  modified_base 7: mod_base = OTHER; note = 2'-O-methylguanosine-3'-phosphate
  modified_base 8: mod_base = OTHER; note = 2'-deoxy-2'-fluorouridine-3'-phosphate
  modified_base 9: mod_base = OTHER; note = 2'-deoxy-2'-fluorocytidine-3'-phosphate
  modified_base 10: mod_base = OTHER; note = 2'-O-methylcytidine-3'-phosphate
  modified_base 11: mod_base = OTHER; note = 2'-O-methyladenosine-3'-phosphate
  modified_base 12: mod_base = OTHER; note = 2'-O-methyluridine-3'-phosphate
  modified_base 13: mod_base = OTHER; note = 2'-O-methyluridine-3'-phosphate
  modified_base 14: mod_base = OTHER; note = 2'-deoxy-2'-fluoroadenosine-3'-phosphate
  modified_base 15: mod_base = OTHER; note = 2'-O-methylcytidine-3'-phosphate
  modified_base 16: mod_base = OTHER; note = 2'-deoxy-2'-fluorouridine-3'-phosphate
  modified_base 17: mod_base = OTHER; note = 2'-O-methyluridine-3'-phosphate
  modified_base 18: mod_base = OTHER; note = 2'-O-methyluridine-3'-phosphate
  modified_base 19: mod_base = OTHER; note = 2'-O-methylcytidine-3'-phosphate
  modified_base 20: mod_base = OTHER; note = 2'-O-methylcytidine-3'-phosphate
  modified_base 21: mod_base = OTHER; note = 2'-O-methyluridine-3'-phosphorothioate
  modified_base 22: mod_base = OTHER; note = 2'-O-methyluridine-3'-phosphorothioate
  modified_base 23: mod_base = OTHER; note = 2'-O-methylcytidine
tcactggtccattactttccttc

SEQ ID NO: 696 - RNA, 23 nt, synthetic construct
  source 1..23: mol_type = other RNA
  modified_base 1: mod_base = OTHER; note = 2'-O-methyluridine-3'-phosphorothioate
  modified_base 2: mod_base = OTHER; note = 2'-deoxy-2'-fluorouridine-3'-phosphorothioate
  modified_base 3: mod_base = OTHER; note = 2'-O-methylcytidine-3'-phosphate
  modified_base 4: mod_base = OTHER; note = 2'-O-methyladenosine-3'-phosphate
  modified_base 5: mod_base = OTHER; note = 2'-O-methylcytidine-3'-phosphate
  modified_base 6: mod_base = OTHER; note = 2'-deoxy-2'-fluorouridine-3'-phosphate
  modified_base 7: mod_base = OTHER; note = 2'-O-methylguanosine-3'-phosphate
  modified_base 8: mod_base = OTHER; note = 2'-deoxy-2'-fluoroguanosine-3'-phosphate
  modified_base 9: mod_base = OTHER; note = 2'-deoxy-2'-fluorouridine-3'-phosphate
  modified_base 10: mod_base = OTHER; note = 2'-O-methylcytidine-3'-phosphate
  modified_base 11: mod_base = OTHER; note = 2'-O-methylcytidine-3'-phosphate
  modified_base 12: mod_base = OTHER; note = 2'-O-methyladenosine-3'-phosphate
  modified_base 13: mod_base = OTHER; note = 2'-O-methyluridine-3'-phosphate
  modified_base 14: mod_base = OTHER; note = 2'-deoxy-2'-fluorouridine-3'-phosphate
  modified_base 15: mod_base = OTHER; note = 2'-O-methyladenosine-3'-phosphate
  modified_base 16: mod_base = OTHER; note = 2'-deoxy-2'-fluorocytidine-3'-phosphate
  modified_base 17: mod_base = OTHER; note = 2'-O-methyluridine-3'-phosphate
  modified_base 18: mod_base = OTHER; note = 2'-O-methyluridine-3'-phosphate
  modified_base 19: mod_base = OTHER; note = 2'-O-methyluridine-3'-phosphate
  modified_base 20: mod_base = OTHER; note = 2'-O-methylcytidine-3'-phosphate
  modified_base 21: mod_base = OTHER; note = 2'-O-methylcytidine-3'-phosphorothioate
  modified_base 22: mod_base = OTHER; note = 2'-O-methyluridine-3'-phosphorothioate
  modified_base 23: mod_base = OTHER; note = 2'-O-methyluridine
ttcactggtccattactttcctt

SEQ ID NO: 697 - RNA, 23 nt, synthetic construct
  source 1..23: mol_type = other RNA
  modified_base 1: mod_base = OTHER; note = 2'-O-methyladenosine-3'-phosphorothioate
  modified_base 2: mod_base = OTHER; note = 2'-deoxy-2'-fluorouridine-3'-phosphorothioate
  modified_base 3: mod_base = OTHER; note = 2'-O-methyluridine-3'-phosphate
  modified_base 4: mod_base = OTHER; note = 2'-O-methylcytidine-3'-phosphate
  modified_base 5: mod_base = OTHER; note = 2'-O-methyladenosine-3'-phosphate
  modified_base 6: mod_base = OTHER; note = 2'-deoxy-2'-fluorocytidine-3'-phosphate
  modified_base 7: mod_base = OTHER; note = 2'-O-methyluridine-3'-phosphate
  modified_base 8: mod_base = OTHER; note = 2'-deoxy-2'-fluoroguanosine-3'-phosphate
  modified_base 9: mod_base = OTHER; note = 2'-deoxy-2'-fluoroguanosine-3'-phosphate
  modified_base 10: mod_base = OTHER; note = 2'-O-methyluridine-3'-phosphate
  modified_base 11: mod_base = OTHER; note = 2'-O-methylcytidine-3'-phosphate
  modified_base 12: mod_base = OTHER; note = 2'-O-methylcytidine-3'-phosphate
  modified_base 13: mod_base = OTHER; note = 2'-O-methyladenosine-3'-phosphate
  modified_base 14: mod_base = OTHER; note = 2'-deoxy-2'-fluorouridine-3'-phosphate
  modified_base 15: mod_base = OTHER; note = 2'-O-methyluridine-3'-phosphate
  modified_base 16: mod_base = OTHER; note = 2'-deoxy-2'-fluoroadenosine-3'-phosphate
  modified_base 17: mod_base = OTHER; note = 2'-O-methylcytidine-3'-phosphate
  modified_base 18: mod_base = OTHER; note = 2'-O-methyluridine-3'-phosphate
  modified_base 19: mod_base = OTHER; note = 2'-O-methyluridine-3'-phosphate
  modified_base 20: mod_base = OTHER; note = 2'-O-methyluridine-3'-phosphate
  modified_base 21: mod_base = OTHER; note = 2'-O-methylcytidine-3'-phosphorothioate
  modified_base 22: mod_base = OTHER; note = 2'-O-methylcytidine-3'-phosphorothioate
  modified_base 23: mod_base = OTHER; note = 2'-O-methyluridine
attcactggtccattactttcct

SEQ ID NO: 698 - RNA, 23 nt, synthetic construct
  source 1..23: mol_type = other RNA
  modified_base 1: mod_base = OTHER; note = 2'-O-methyladenosine-3'-phosphorothioate
  modified_base 2: mod_base = OTHER; note = 2'-deoxy-2'-fluorocytidine-3'-phosphorothioate
  modified_base 3: mod_base = OTHER; note = 2'-O-methyluridine-3'-phosphate
  modified_base 4: mod_base = OTHER; note = 2'-O-methyluridine-3'-phosphate
  modified_base 5: mod_base = OTHER; note = 2'-O-methylcytidine-3'-phosphate
  modified_base 6: mod_base = OTHER; note = 2'-deoxy-2'-fluoroadenosine-3'-phosphate
  modified_base 7: mod_base = OTHER; note = 2'-O-methylcytidine-3'-phosphate
  modified_base 8: mod_base = OTHER; note = 2'-deoxy-2'-fluorouridine-3'-phosphate
  modified_base 9: mod_base = OTHER; note = 2'-deoxy-2'-fluoroguanosine-3'-phosphate
  modified_base 10: mod_base = OTHER; note = 2'-O-methylguanosine-3'-phosphate
  modified_base 11: mod_base = OTHER; note = 2'-O-methyluridine-3'-phosphate
  modified_base 12: mod_base = OTHER; note = 2'-O-methylcytidine-3'-phosphate
  modified_base 13: mod_base = OTHER; note = 2'-O-methylcytidine-3'-phosphate
  modified_base 14: mod_base = OTHER; note = 2'-deoxy-2'-fluoroadenosine-3'-phosphate
  modified_base 15: mod_base = OTHER; note = 2'-O-methyluridine-3'-phosphate
  modified_base 16: mod_base = OTHER; note = 2'-deoxy-2'-fluorouridine-3'-phosphate
  modified_base 17: mod_base = OTHER; note = 2'-O-methyladenosine-3'-phosphate
  modified_base 18: mod_base = OTHER; note = 2'-O-methylcytidine-3'-phosphate
  modified_base 19: mod_base = OTHER; note = 2'-O-methyluridine-3'-phosphate
  modified_base 20: mod_base = OTHER; note = 2'-O-methyluridine-3'-phosphate
  modified_base 21: mod_base = OTHER; note = 2'-O-methyluridine-3'-phosphorothioate
  modified_base 22: mod_base = OTHER; note = 2'-O-methylcytidine-3'-phosphorothioate
  modified_base 23: mod_base = OTHER; note = 2'-O-methylcytidine
acttcactggtccattactttcc

SEQ ID NO: 699 - RNA, 23 nt, synthetic construct
  source 1..23: mol_type = other RNA
  modified_base 1: mod_base = OTHER; note = 2'-O-methyladenosine-3'-phosphorothioate
  modified_base 2: mod_base = OTHER; note = 2'-deoxy-2'-fluorocytidine-3'-phosphorothioate
  modified_base 3: mod_base = OTHER; note = 2'-O-methylcytidine-3'-phosphate
  modified_base 4: mod_base = OTHER; note = 2'-O-methyluridine-3'-phosphate
  modified_base 5: mod_base = OTHER; note = 2'-O-methyluridine-3'-phosphate
  modified_base 6: mod_base = OTHER; note = 2'-deoxy-2'-fluorocytidine-3'-phosphate
  modified_base 7: mod_base = OTHER; note = 2'-O-methyladenosine-3'-phosphate
  modified_base 8: mod_base = OTHER; note = 2'-deoxy-2'-fluorocytidine-3'-phosphate
  modified_base 9: mod_base = OTHER; note = 2'-deoxy-2'-fluorouridine-3'-phosphate
  modified_base 10: mod_base = OTHER; note = 2'-O-methylguanosine-3'-phosphate
  modified_base 11: mod_base = OTHER; note = 2'-O-methylguanosine-3'-phosphate
  modified_base 12: mod_base = OTHER; note = 2'-O-methyluridine-3'-phosphate
  modified_base 13: mod_base = OTHER; note = 2'-O-methylcytidine-3'-phosphate
  modified_base 14: mod_base = OTHER; note = 2'-deoxy-2'-fluorocytidine-3'-phosphate
  modified_base 15: mod_base = OTHER; note = 2'-O-methyladenosine-3'-phosphate
  modified_base 16: mod_base = OTHER; note = 2'-deoxy-2'-fluorouridine-3'-phosphate
  modified_base 17: mod_base = OTHER; note = 2'-O-methyluridine-3'-phosphate
  modified_base 18: mod_base = OTHER; note = 2'-O-methyladenosine-3'-phosphate
  modified_base 19: mod_base = OTHER; note = 2'-O-methylcytidine-3'-phosphate
  modified_base 20: mod_base = OTHER; note = 2'-O-methyluridine-3'-phosphate
  modified_base 21: mod_base = OTHER; note = 2'-O-methyluridine-3'-phosphorothioate
  modified_base 22: mod_base = OTHER; note = 2'-O-methyluridine-3'-phosphorothioate
  modified_base 23: mod_base = OTHER; note = 2'-O-methylcytidine
accttcactggtccattactttc

SEQ ID NO: 700 - RNA, 23 nt, synthetic construct
  source 1..23: mol_type = other RNA
  modified_base 1: mod_base = OTHER; note = 2'-O-methyladenosine-3'-phosphorothioate
  modified_base 2: mod_base = OTHER; note = 2'-deoxy-2'-fluoroadenosine-3'-phosphorothioate
  modified_base 3: mod_base = OTHER; note = 2'-O-methylcytidine-3'-phosphate
  modified_base 4: mod_base = OTHER; note = 2'-O-methylcytidine-3'-phosphate
  modified_base 5: mod_base = OTHER; note = 2'-O-methyluridine-3'-phosphate
  modified_base 6: mod_base = OTHER; note = 2'-deoxy-2'-fluorouridine-3'-phosphate
  modified_base 7: mod_base = OTHER; note = 2'-O-methylcytidine-3'-phosphate
  modified_base 8: mod_base = OTHER; note = 2'-deoxy-2'-fluoroadenosine-3'-phosphate
  modified_base 9: mod_base = OTHER; note = 2'-deoxy-2'-fluorocytidine-3'-phosphate
  modified_base 10: mod_base = OTHER; note = 2'-O-methyluridine-3'-phosphate
  modified_base 11: mod_base = OTHER; note = 2'-O-methylguanosine-3'-phosphate
  modified_base 12: mod_base = OTHER; note = 2'-O-methylguanosine-3'-phosphate
  modified_base 13: mod_base = OTHER; note = 2'-O-methyluridine-3'-phosphate
  modified_base 14: mod_base = OTHER; note = 2'-deoxy-2'-fluorocytidine-3'-phosphate
  modified_base 15: mod_base = OTHER; note = 2'-O-methylcytidine-3'-phosphate
  modified_base 16: mod_base = OTHER; note = 2'-deoxy-2'-fluoroadenosine-3'-phosphate
  modified_base 17: mod_base = OTHER; note = 2'-O-methyluridine-3'-phosphate
  modified_base 18: mod_base = OTHER; note = 2'-O-methyluridine-3'-phosphate
  modified_base 19: mod_base = OTHER; note = 2'-O-methyladenosine-3'-phosphate
  modified_base 20: mod_base = OTHER; note = 2'-O-methylcytidine-3'-phosphate
  modified_base 21: mod_base = OTHER; note = 2'-O-methyluridine-3'-phosphorothioate
  modified_base 22: mod_base = OTHER; note = 2'-O-methyluridine-3'-phosphorothioate
  modified_base 23: mod_base = OTHER; note = 2'-O-methyluridine
aaccttcactggtccattacttt

SEQ ID NO: 701 - RNA, 23 nt, synthetic construct
  source 1..23: mol_type = other RNA
  modified_base 1: mod_base = OTHER; note = 2'-O-methyluridine-3'-phosphorothioate
  modified_base 2: mod_base = OTHER; note = 2'-deoxy-2'-fluoroguanosine-3'-phosphorothioate
  modified_base 3: mod_base = OTHER; note = 2'-O-methylguanosine-3'-phosphate
  modified_base 4: mod_base = OTHER; note = 2'-O-methyladenosine-3'-phosphate
  modified_base 5: mod_base = OTHER; note = 2'-O-methyladenosine-3'-phosphate
  modified_base 6: mod_base = OTHER; note = 2'-deoxy-2'-fluorouridine-3'-phosphate
  modified_base 7: mod_base = OTHER; note = 2'-O-methylcytidine-3'-phosphate
  modified_base 8: mod_base = OTHER; note = 2'-deoxy-2'-fluorocytidine-3'-phosphate
  modified_base 9: mod_base = OTHER; note = 2'-deoxy-2'-fluoroadenosine-3'-phosphate
  modified_base 10: mod_base = OTHER; note = 2'-O-methyluridine-3'-phosphate
  modified_base 11: mod_base = OTHER; note = 2'-O-methylguanosine-3'-phosphate
  modified_base 12: mod_base = OTHER; note = 2'-O-methylcytidine-3'-phosphate
  modified_base 13: mod_base = OTHER; note = 2'-O-methyladenosine-3'-phosphate
  modified_base 14: mod_base = OTHER; note = 2'-deoxy-2'-fluoroguanosine-3'-phosphate
  modified_base 15: mod_base = OTHER; note = 2'-O-methylguanosine-3'-phosphate
  modified_base 16: mod_base = OTHER; note = 2'-deoxy-2'-fluorocytidine-3'-phosphate
  modified_base 17: mod_base = OTHER; note = 2'-O-methylcytidine-3'-phosphate
  modified_base 18: mod_base = OTHER; note = 2'-O-methyluridine-3'-phosphate
  modified_base 19: mod_base = OTHER; note = 2'-O-methyluridine-3'-phosphate
  modified_base 20: mod_base = OTHER; note = 2'-O-methylcytidine-3'-phosphate
  modified_base 21: mod_base = OTHER; note = 2'-O-methyladenosine-3'-phosphorothioate
  modified_base 22: mod_base = OTHER; note = 2'-O-methylguanosine-3'-phosphorothioate
  modified_base 23: mod_base = OTHER; note = 2'-O-methyluridine
tggaatccatgcaggccttcagt

SEQ ID NO: 702 - RNA, 23 nt, synthetic construct
  source 1..23: mol_type = other RNA
  modified_base 1: mod_base = OTHER; note = 2'-O-methyladenosine-3'-phosphorothioate
  modified_base 2: mod_base = OTHER; note = 2'-deoxy-2'-fluorouridine-3'-phosphorothioate
  modified_base 3: mod_base = OTHER; note = 2'-O-methylguanosine-3'-phosphate
  modified_base 4: mod_base = OTHER; note = 2'-O-methylguanosine-3'-phosphate
  modified_base 5: mod_base = OTHER; note = 2'-O-methyladenosine-3'-phosphate
  modified_base 6: mod_base = OTHER; note = 2'-deoxy-2'-fluoroadenosine-3'-phosphate
  modified_base 7: mod_base = OTHER; note = 2'-O-methyluridine-3'-phosphate
  modified_base 8: mod_base = OTHER; note = 2'-deoxy-2'-fluorocytidine-3'-phosphate
  modified_base 9: mod_base = OTHER; note = 2'-deoxy-2'-fluorocytidine-3'-phosphate
  modified_base 10: mod_base = OTHER; note = 2'-O-methyladenosine-3'-phosphate
  modified_base 11: mod_base = OTHER; note = 2'-O-methyluridine-3'-phosphate
  modified_base 12: mod_base = OTHER; note = 2'-O-methylguanosine-3'-phosphate
  modified_base 13: mod_base = OTHER; note = 2'-O-methylcytidine-3'-phosphate
  modified_base 14: mod_base = OTHER; note = 2'-deoxy-2'-fluoroadenosine-3'-phosphate
  modified_base 15: mod_base = OTHER; note = 2'-O-methylguanosine-3'-phosphate
  modified_base 16: mod_base = OTHER; note = 2'-deoxy-2'-fluoroguanosine-3'-phosphate
  modified_base 17: mod_base = OTHER; note = 2'-O-methylcytidine-3'-phosphate
  modified_base 18: mod_base = OTHER; note = 2'-O-methylcytidine-3'-phosphate
  modified_base 19: mod_base = OTHER; note = 2'-O-methyluridine-3'-phosphate
  modified_base 20: mod_base = OTHER; note = 2'-O-methyluridine-3'-phosphate
  modified_base 21: mod_base = OTHER; note = 2'-O-methylcytidine-3'-phosphorothioate
  modified_base 22: mod_base = OTHER; note = 2'-O-methyladenosine-3'-phosphorothioate
  modified_base 23: mod_base = OTHER; note = 2'-O-methylguanosine
atggaatccatgcaggccttcag

SEQ ID NO: 703 - RNA, 23 nt, synthetic construct
  source 1..23: mol_type = other RNA
  modified_base 1: mod_base = OTHER; note = 2'-O-methyladenosine-3'-phosphorothioate
  modified_base 2: mod_base = OTHER; note = 2'-deoxy-2'-fluorocytidine-3'-phosphorothioate
  modified_base 3: mod_base = OTHER; note = 2'-O-methyladenosine-3'-phosphate
  modified_base 4: mod_base = OTHER; note = 2'-O-methyluridine-3'-phosphate
  modified_base 5: mod_base = OTHER; note = 2'-O-methylguanosine-3'-phosphate
  modified_base 6: mod_base = OTHER; note = 2'-deoxy-2'-fluoroguanosine-3'-phosphate
  modified_base 7: mod_base = OTHER; note = 2'-O-methyladenosine-3'-phosphate
  modified_base 8: mod_base = OTHER; note = 2'-deoxy-2'-fluoroadenosine-3'-phosphate
  modified_base 9: mod_base = OTHER; note = 2'-deoxy-2'-fluorouridine-3'-phosphate
  modified_base 10: mod_base = OTHER; note = 2'-O-methylcytidine-3'-phosphate
  modified_base 11: mod_base = OTHER; note = 2'-O-methylcytidine-3'-phosphate
  modified_base 12: mod_base = OTHER; note = 2'-O-methyladenosine-3'-phosphate
  modified_base 13: mod_base = OTHER; note = 2'-O-methyluridine-3'-phosphate
  modified_base 14: mod_base = OTHER; note = 2'-deoxy-2'-fluoroguanosine-3'-phosphate
  modified_base 15: mod_base = OTHER; note = 2'-O-methylcytidine-3'-phosphate
  modified_base 16: mod_base = OTHER; note = 2'-deoxy-2'-fluoroadenosine-3'-phosphate
  modified_base 17: mod_base = OTHER; note = 2'-O-methylguanosine-3'-phosphate
  modified_base 18: mod_base = OTHER; note = 2'-O-methylguanosine-3'-phosphate
  modified_base 19: mod_base = OTHER; note = 2'-O-methylcytidine-3'-phosphate
  modified_base 20: mod_base = OTHER; note = 2'-O-methylcytidine-3'-phosphate
  modified_base 21: mod_base = OTHER; note = 2'-O-methyluridine-3'-phosphorothioate
  modified_base 22: mod_base = OTHER; note = 2'-O-methyluridine-3'-phosphorothioate
  modified_base 23: mod_base = OTHER; note = 2'-O-methylcytidine
acatggaatccatgcaggccttc

SEQ ID NO: 704 - RNA, 23 nt, synthetic construct
  source 1..23: mol_type = other RNA
  modified_base 1: mod_base = OTHER; note = 2'-O-methyladenosine-3'-phosphorothioate
  modified_base 2: mod_base = OTHER; note = 2'-deoxy-2'-fluoroadenosine-3'-phosphorothioate
  modified_base 3: mod_base = OTHER; note = 2'-O-methylcytidine-3'-phosphate
  modified_base 4: mod_base = OTHER; note = 2'-O-methyladenosine-3'-phosphate
  modified_base 5: mod_base = OTHER; note = 2'-O-methyluridine-3'-phosphate
  modified_base 6: mod_base = OTHER; note = 2'-deoxy-2'-fluoroguanosine-3'-phosphate
  modified_base 7: mod_base = OTHER; note = 2'-O-methylguanosine-3'-phosphate
  modified_base 8: mod_base = OTHER; note = 2'-deoxy-2'-fluoroadenosine-3'-phosphate
  modified_base 9: mod_base = OTHER; note = 2'-deoxy-2'-fluoroadenosine-3'-phosphate
  modified_base 10: mod_base = OTHER; note = 2'-O-methyluridine-3'-phosphate
  modified_base 11: mod_base = OTHER; note = 2'-O-methylcytidine-3'-phosphate
  modified_base 12: mod_base = OTHER; note = 2'-O-methylcytidine-3'-phosphate
  modified_base 13: mod_base = OTHER; note = 2'-O-methyladenosine-3'-phosphate
  modified_base 14: mod_base = OTHER; note = 2'-deoxy-2'-fluorouridine-3'-phosphate
  modified_base 15: mod_base = OTHER; note = 2'-O-methylguanosine-3'-phosphate
  modified_base 16: mod_base = OTHER; note = 2'-deoxy-2'-fluorocytidine-3'-phosphate
  modified_base 17: mod_base = OTHER; note = 2'-O-methyladenosine-3'-phosphate
  modified_base 18: mod_base = OTHER; note = 2'-O-methylguanosine-3'-phosphate
  modified_base 19: mod_base = OTHER; note = 2'-O-methylguanosine-3'-phosphate
  modified_base 20: mod_base = OTHER; note = 2'-O-methylcytidine-3'-phosphate
  modified_base 21: mod_base = OTHER; note = 2'-O-methylcytidine-3'-phosphorothioate
  modified_base 22: mod_base = OTHER; note = 2'-O-methyluridine-3'-phosphorothioate
  modified_base 23: mod_base = OTHER; note = 2'-O-methyluridine
aacatggaatccatgcaggcctt

SEQ ID NO: 705 - RNA, 23 nt, synthetic construct
  source 1..23: mol_type = other RNA
  modified_base 1: mod_base = OTHER; note = 2'-O-methyladenosine-3'-phosphorothioate
  modified_base 2: mod_base = OTHER; note = 2'-deoxy-2'-fluoroadenosine-3'-phosphorothioate
  modified_base 3: mod_base = OTHER; note = 2'-O-methyladenosine-3'-phosphate
  modified_base 4: mod_base = OTHER; note = 2'-O-methylcytidine-3'-phosphate
  modified_base 5: mod_base = OTHER; note = 2'-O-methyladenosine-3'-phosphate
  modified_base 6: mod_base = OTHER; note = 2'-deoxy-2'-fluorouridine-3'-phosphate
  modified_base 7: mod_base = OTHER; note = 2'-O-methylguanosine-3'-phosphate
  modified_base 8: mod_base = OTHER; note = 2'-deoxy-2'-fluoroguanosine-3'-phosphate
  modified_base 9: mod_base = OTHER; note = 2'-deoxy-2'-fluoroadenosine-3'-phosphate
  modified_base 10: mod_base = OTHER; note = 2'-O-methyladenosine-3'-phosphate
  modified_base 11: mod_base = OTHER; note = 2'-O-methyluridine-3'-phosphate
  modified_base 12: mod_base = OTHER; note = 2'-O-methylcytidine-3'-phosphate
  modified_base 13: mod_base = OTHER; note = 2'-O-methylcytidine-3'-phosphate
  modified_base 14: mod_base = OTHER; note = 2'-deoxy-2'-fluoroadenosine-3'-phosphate
  modified_base 15: mod_base = OTHER; note = 2'-O-methyluridine-3'-phosphate
  modified_base 16: mod_base = OTHER; note = 2'-deoxy-2'-fluoroguanosine-3'-phosphate
  modified_base 17: mod_base = OTHER; note = 2'-O-methylcytidine-3'-phosphate
  modified_base 18: mod_base = OTHER; note = 2'-O-methyladenosine-3'-phosphate
  modified_base 19: mod_base = OTHER; note = 2'-O-methylguanosine-3'-phosphate
  modified_base 20: mod_base = OTHER; note = 2'-O-methylguanosine-3'-phosphate
  modified_base 21: mod_base = OTHER; note = 2'-O-methylcytidine-3'-phosphorothioate
  modified_base 22: mod_base = OTHER; note = 2'-O-methylcytidine-3'-phosphorothioate
  modified_base 23: mod_base = OTHER; note = 2'-O-methyluridine
aaacatggaatccatgcaggcct

SEQ ID NO: 706 - RNA, 23 nt, synthetic construct
  source 1..23: mol_type = other RNA
  modified_base 1: mod_base = OTHER; note = 2'-O-methyluridine-3'-phosphorothioate
  modified_base 2: mod_base = OTHER; note = 2'-deoxy-2'-fluoroguanosine-3'-phosphorothioate
  modified_base 3: mod_base = OTHER; note = 2'-O-methyladenosine-3'-phosphate
  modified_base 4: mod_base = OTHER; note = 2'-O-methyladenosine-3'-phosphate
  modified_base 5: mod_base = OTHER; note = 2'-O-methylcytidine-3'-phosphate
  modified_base 6: mod_base = OTHER; note = 2'-deoxy-2'-fluoroadenosine-3'-phosphate
  modified_base 7: mod_base = OTHER; note = 2'-O-methyluridine-3'-phosphate
  modified_base 8: mod_base = OTHER; note = 2'-deoxy-2'-fluoroguanosine-3'-phosphate
  modified_base 9: mod_base = OTHER; note = 2'-deoxy-2'-fluoroguanosine-3'-phosphate
  modified_base 10: mod_base = OTHER; note = 2'-O-methyladenosine-3'-phosphate
  modified_base 11: mod_base = OTHER; note = 2'-O-methyladenosine-3'-phosphate
  modified_base 12: mod_base = OTHER; note = 2'-O-methyluridine-3'-phosphate
  modified_base 13: mod_base = OTHER; note = 2'-O-methylcytidine-3'-phosphate
  modified_base 14: mod_base = OTHER; note = 2'-deoxy-2'-fluorocytidine-3'-phosphate
  modified_base 15: mod_base = OTHER; note = 2'-O-methyladenosine-3'-phosphate
  modified_base 16: mod_base = OTHER; note = 2'-deoxy-2'-fluorouridine-3'-phosphate
  modified_base 17: mod_base = OTHER; note = 2'-O-methylguanosine-3'-phosphate
  modified_base 18: mod_base = OTHER; note = 2'-O-methylcytidine-3'-phosphate
  modified_base 19: mod_base = OTHER; note = 2'-O-methyladenosine-3'-phosphate
  modified_base 20: mod_base = OTHER; note = 2'-O-methylguanosine-3'-phosphate
  modified_base 21: mod_base = OTHER; note = 2'-O-methylguanosine-3'-phosphorothioate
  modified_base 22: mod_base = OTHER; note = 2'-O-methylcytidine-3'-phosphorothioate
  modified_base 23: mod_base = OTHER; note = 2'-O-methylcytidine
tgaacatggaatccatgcaggcc

SEQ ID NO: 707 - RNA, 23 nt, synthetic construct
  source 1..23: mol_type = other RNA
  modified_base 1: mod_base = OTHER; note = 2'-O-methyladenosine-3'-phosphorothioate
  modified_base 2: mod_base = OTHER; note = 2'-deoxy-2'-fluorouridine-3'-phosphorothioate
  modified_base 3: mod_base = OTHER; note = 2'-O-methylguanosine-3'-phosphate
  modified_base 4: mod_base = OTHER; note = 2'-O-methyladenosine-3'-phosphate
  modified_base 5: mod_base = OTHER; note = 2'-O-methyladenosine-3'-phosphate
  modified_base 6: mod_base = OTHER; note = 2'-deoxy-2'-fluorocytidine-3'-phosphate
  modified_base 7: mod_base = OTHER; note = 2'-O-methyladenosine-3'-phosphate
  modified_base 8: mod_base = OTHER; note = 2'-deoxy-2'-fluorouridine-3'-phosphate
  modified_base 9: mod_base = OTHER; note = 2'-deoxy-2'-fluoroguanosine-3'-phosphate
  modified_base 10: mod_base = OTHER; note = 2'-O-methylguanosine-3'-phosphate
  modified_base 11: mod_base = OTHER; note = 2'-O-methyladenosine-3'-phosphate
  modified_base 12: mod_base = OTHER; note = 2'-O-methyladenosine-3'-phosphate
  modified_base 13: mod_base = OTHER; note = 2'-O-methyluridine-3'-phosphate
  modified_base 14: mod_base = OTHER; note = 2'-deoxy-2'-fluorocytidine-3'-phosphate
  modified_base 15: mod_base = OTHER; note = 2'-O-methylcytidine-3'-phosphate
  modified_base 16: mod_base = OTHER; note = 2'-deoxy-2'-fluoroadenosine-3'-phosphate
  modified_base 17: mod_base = OTHER; note = 2'-O-methyluridine-3'-phosphate
  modified_base 18: mod_base = OTHER; note = 2'-O-methylguanosine-3'-phosphate
  modified_base 19: mod_base = OTHER; note = 2'-O-methylcytidine-3'-phosphate
  modified_base 20: mod_base = OTHER; note = 2'-O-methyladenosine-3'-phosphate
  modified_base 21: mod_base = OTHER; note = 2'-O-methylguanosine-3'-phosphorothioate
  modified_base 22: mod_base = OTHER; note = 2'-O-methylguanosine-3'-phosphorothioate
  modified_base 23: mod_base = OTHER; note = 2'-O-methylcytidine
atgaacatggaatccatgcaggc

SEQ ID NO: 708 - RNA, 23 nt, synthetic construct
  source 1..23: mol_type = other RNA
  modified_base 1: mod_base = OTHER; note = 2'-O-methyladenosine-3'-phosphorothioate
  modified_base 2: mod_base = OTHER; note = 2'-deoxy-2'-fluorouridine-3'-phosphorothioate
  modified_base 3: mod_base = OTHER; note = 2'-O-methylcytidine-3'-phosphate
  modified_base 4: mod_base = OTHER; note = 2'-O-methyluridine-3'-phosphate
  modified_base 5: mod_base = OTHER; note = 2'-O-methyluridine-3'-phosphate
  modified_base 6: mod_base = OTHER; note = 2'-deoxy-2'-fluorocytidine-3'-phosphate
  modified_base 7: mod_base = OTHER; note = 2'-O-methyladenosine-3'-phosphate
  modified_base 8: mod_base = OTHER; note = 2'-deoxy-2'-fluorouridine-3'-phosphate
  modified_base 9: mod_base = OTHER; note = 2'-deoxy-2'-fluorocytidine-3'-phosphate
  modified_base 10: mod_base = OTHER; note = 2'-O-methylcytidine-3'-phosphate
  modified_base 11: mod_base = OTHER; note = 2'-O-methyluridine-3'-phosphate
  modified_base 12: mod_base = OTHER; note = 2'-O-methyluridine-3'-phosphate
  modified_base 13: mod_base = OTHER; note = 2'-O-methyluridine-3'-phosphate
  modified_base 14: mod_base = OTHER; note = 2'-deoxy-2'-fluoroguanosine-3'-phosphate
  modified_base 15: mod_base = OTHER; note = 2'-O-methylguanosine-3'-phosphate
  modified_base 16: mod_base = OTHER; note = 2'-deoxy-2'-fluorocytidine-3'-phosphate
  modified_base 17: mod_base = OTHER; note = 2'-O-methylcytidine-3'-phosphate
  modified_base 18: mod_base = OTHER; note = 2'-O-methylcytidine-3'-phosphate
  modified_base 19: mod_base = OTHER; note = 2'-O-methyladenosine-3'-phosphate
  modified_base 20: mod_base = OTHER; note = 2'-O-methylcytidine-3'-phosphate
  modified_base 21: mod_base = OTHER; note = 2'-O-methylcytidine-3'-phosphorothioate
  modified_base 22: mod_base = OTHER; note = 2'-O-methylguanosine-3'-phosphorothioate
  modified_base 23: mod_base = OTHER; note = 2'-O-methyluridine
atcttcatcctttggcccaccgt

SEQ ID NO: 709 - RNA, 23 nt, synthetic construct
  source 1..23: mol_type = other RNA
  modified_base 1: mod_base = OTHER; note = 2'-O-methyluridine-3'-phosphorothioate
  modified_base 2: mod_base = OTHER; note = 2'-deoxy-2'-fluorocytidine-3'-phosphorothioate
  modified_base 3: mod_base = OTHER; note = 2'-O-methylcytidine-3'-phosphate
  modified_base 4: mod_base = OTHER; note = 2'-O-methyladenosine-3'-phosphate
  modified_base 5: mod_base = OTHER; note = 2'-O-methyladenosine-3'-phosphate
  modified_base 6: mod_base = OTHER; note = 2'-deoxy-2'-fluorocytidine-3'-phosphate
  modified_base 7: mod_base = OTHER; note = 2'-O-methyladenosine-3'-phosphate
  modified_base 8: mod_base = OTHER; note = 2'-deoxy-2'-fluorouridine-3'-phosphate
  modified_base 9: mod_base = OTHER; note = 2'-deoxy-2'-fluoroguanosine-3'-phosphate
  modified_base 10: mod_base = OTHER; note = 2'-O-methylcytidine-3'-phosphate
  modified_base 11: mod_base = OTHER; note = 2'-O-methylcytidine-3'-phosphate
  modified_base 12: mod_base = OTHER; note = 2'-O-methyluridine-3'-phosphate
  modified_base 13: mod_base = OTHER; note = 2'-O-methylcytidine-3'-phosphate
  modified_base 14: mod_base = OTHER; note = 2'-deoxy-2'-fluorouridine-3'-phosphate
  modified_base 15: mod_base = OTHER; note = 2'-O-methylcytidine-3'-phosphate
  modified_base 16: mod_base = OTHER; note = 2'-deoxy-2'-fluorouridine-3'-phosphate
  modified_base 17: mod_base = OTHER; note = 2'-O-methyluridine-3'-phosphate
  modified_base 18: mod_base = OTHER; note = 2'-O-methylcytidine-3'-phosphate
  modified_base 19: mod_base = OTHER; note = 2'-O-methyladenosine-3'-phosphate
  modified_base 20: mod_base = OTHER; note = 2'-O-methyluridine-3'-phosphate
  modified_base 21: mod_base = OTHER; note = 2'-O-methylcytidine-3'-phosphorothioate
  modified_base 22: mod_base = OTHER; note = 2'-O-methylcytidine-3'-phosphorothioate
  modified_base 23: mod_base = OTHER; note = 2'-O-methyluridine
tccaacatgcctctcttcatcct

SEQ ID NO: 710 - RNA, 23 nt, synthetic construct
  source 1..23: mol_type = other RNA
  modified_base 1: mod_base = OTHER; note = 2'-O-methyladenosine-3'-phosphorothioate
  modified_base 2: mod_base = OTHER; note = 2'-deoxy-2'-fluoroadenosine-3'-phosphorothioate
  modified_base 3: mod_base = OTHER; note = 2'-O-methyluridine-3'-phosphate
  modified_base 4: mod_base = OTHER; note = 2'-O-methylguanosine-3'-phosphate
  modified_base 5: mod_base = OTHER; note = 2'-O-methylcytidine-3'-phosphate
  modified_base 6: mod_base = OTHER; note = 2'-deoxy-2'-fluorocytidine-3'-phosphate
  modified_base 7: mod_base = OTHER; note = 2'-O-methyluridine-3'-phosphate
  modified_base 8: mod_base = OTHER; note = 2'-deoxy-2'-fluorocytidine-3'-phosphate
  modified_base 9: mod_base = OTHER; note = 2'-deoxy-2'-fluorouridine-3'-phosphate
  modified_base 10: mod_base = OTHER; note = 2'-O-methylcytidine-3'-phosphate
  modified_base 11: mod_base = OTHER; note = 2'-O-methyluridine-3'-phosphate
  modified_base 12: mod_base = OTHER; note = 2'-O-methyluridine-3'-phosphate
  modified_base 13: mod_base = OTHER; note = 2'-O-methylcytidine-3'-phosphate
  modified_base 14: mod_base = OTHER; note = 2'-deoxy-2'-fluoroadenosine-3'-phosphate
  modified_base 15: mod_base = OTHER; note = 2'-O-methyluridine-3'-phosphate
  modified_base 16: mod_base = OTHER; note = 2'-deoxy-2'-fluorocytidine-3'-phosphate
  modified_base 17: mod_base = OTHER; note = 2'-O-methylcytidine-3'-phosphate
  modified_base 18: mod_base = OTHER; note = 2'-O-methyluridine-3'-phosphate
  modified_base 19: mod_base = OTHER; note = 2'-O-methyluridine-3'-phosphate
  modified_base 20: mod_base = OTHER; note = 2'-O-methyluridine-3'-phosphate
  modified_base 21: mod_base = OTHER; note = 2'-O-methylguanosine-3'-phosphorothioate
  modified_base 22: mod_base = OTHER; note = 2'-O-methylguanosine-3'-phosphorothioate
  modified_base 23: mod_base = OTHER; note = 2'-O-methylcytidine
aatgcctctcttcatcctttggc

SEQ ID NO: 711 - RNA, 23 nt, synthetic construct
  source 1..23: mol_type = other RNA
  modified_base 1: mod_base = OTHER; note = 2'-O-methyladenosine-3'-phosphorothioate
  modified_base 2: mod_base = OTHER; note = 2'-deoxy-2'-fluoroadenosine-3'-phosphorothioate
  modified_base 3: mod_base = OTHER; note = 2'-O-methylcytidine-3'-phosphate
  modified_base 4: mod_base = OTHER; note = 2'-O-methyladenosine-3'-phosphate
  modified_base 5: mod_base = OTHER; note = 2'-O-methyluridine-3'-phosphate
  modified_base 6: mod_base = OTHER; note = 2'-deoxy-2'-fluoroguanosine-3'-phosphate
  modified_base 7: mod_base = OTHER; note = 2'-O-methylcytidine-3'-phosphate
  modified_base 8: mod_base = OTHER; note = 2'-deoxy-2'-fluorocytidine-3'-phosphate
  modified_base 9: mod_base = OTHER; note = 2'-deoxy-2'-fluorouridine-3'-phosphate
  modified_base 10: mod_base = OTHER; note = 2'-O-methylcytidine-3'-phosphate
  modified_base 11: mod_base = OTHER; note = 2'-O-methyluridine-3'-phosphate
  modified_base 12: mod_base = OTHER; note = 2'-O-methylcytidine-3'-phosphate
  modified_base 13: mod_base = OTHER; note = 2'-O-methyluridine-3'-phosphate
  modified_base 14: mod_base = OTHER; note = 2'-deoxy-2'-fluorouridine-3'-phosphate
  modified_base 15: mod_base = OTHER; note = 2'-O-methylcytidine-3'-phosphate
  modified_base 16: mod_base = OTHER; note = 2'-deoxy-2'-fluoroadenosine-3'-phosphate
  modified_base 17: mod_base = OTHER; note = 2'-O-methyluridine-3'-phosphate
  modified_base 18: mod_base = OTHER; note = 2'-O-methylcytidine-3'-phosphate
  modified_base 19: mod_base = OTHER; note = 2'-O-methylcytidine-3'-phosphate
  modified_base 20: mod_base = OTHER; note = 2'-O-methyluridine-3'-phosphate
  modified_base 21: mod_base = OTHER; note = 2'-O-methyluridine-3'-phosphorothioate
  modified_base 22: mod_base = OTHER; note = 2'-O-methyluridine-3'-phosphorothioate
  modified_base 23: mod_base = OTHER; note = 2'-O-methylguanosine
aacatgcctctcttcatcctttg

SEQ ID NO: 712 - RNA, 23 nt, synthetic construct
  source 1..23: mol_type = other RNA
  modified_base 1: mod_base = OTHER; note = 2'-O-methyladenosine-3'-phosphorothioate
  modified_base 2: mod_base = OTHER; note = 2'-deoxy-2'-fluoroadenosine-3'-phosphorothioate
  modified_base 3: mod_base = OTHER; note = 2'-O-methyladenosine-3'-phosphate
  modified_base 4: mod_base = OTHER; note = 2'-O-methylcytidine-3'-phosphate
  modified_base 5: mod_base = OTHER; note = 2'-O-methyladenosine-3'-phosphate
  modified_base 6: mod_base = OTHER; note = 2'-deoxy-2'-fluorouridine-3'-phosphate
  modified_base 7: mod_base = OTHER; note = 2'-O-methylguanosine-3'-phosphate
  modified_base 8: mod_base = OTHER; note = 2'-deoxy-2'-fluorocytidine-3'-phosphate
  modified_base 9: mod_base = OTHER; note = 2'-deoxy-2'-fluorocytidine-3'-phosphate
  modified_base 10: mod_base = OTHER; note = 2'-O-methyluridine-3'-phosphate
  modified_base 11: mod_base = OTHER; note = 2'-O-methylcytidine-3'-phosphate
  modified_base 12: mod_base = OTHER; note = 2'-O-methyluridine-3'-phosphate
  modified_base 13: mod_base = OTHER; note = 2'-O-methylcytidine-3'-phosphate
  modified_base 14: mod_base = OTHER; note = 2'-deoxy-2'-fluorouridine-3'-phosphate
  modified_base 15: mod_base = OTHER; note = 2'-O-methyluridine-3'-phosphate
  modified_base 16: mod_base = OTHER; note = 2'-deoxy-2'-fluorocytidine-3'-phosphate
  modified_base 17: mod_base = OTHER; note = 2'-O-methyladenosine-3'-phosphate
  modified_base 18: mod_base = OTHER; note = 2'-O-methyluridine-3'-phosphate
  modified_base 19: mod_base = OTHER; note = 2'-O-methylcytidine-3'-phosphate
  modified_base 20: mod_base = OTHER; note = 2'-O-methylcytidine-3'-phosphate
  modified_base 21: mod_base = OTHER; note = 2'-O-methyluridine-3'-phosphorothioate
  modified_base 22: mod_base = OTHER; note = 2'-O-methyluridine-3'-phosphorothioate
  modified_base 23: mod_base = OTHER; note = 2'-O-methyluridine
aaacatgcctctcttcatccttt

SEQ ID NO: 713 - RNA, 23 nt, synthetic construct
  source 1..23: mol_type = other RNA
  modified_base 1: mod_base = OTHER; note = 2'-O-methyladenosine-3'-phosphorothioate
  modified_base 2: mod_base = OTHER; note = 2'-deoxy-2'-fluorocytidine-3'-phosphorothioate
  modified_base 3: mod_base = OTHER; note = 2'-O-methyladenosine-3'-phosphate
  modified_base 4: mod_base = OTHER; note = 2'-O-methyladenosine-3'-phosphate
  modified_base 5: mod_base = OTHER; note = 2'-O-methylcytidine-3'-phosphate
  modified_base 6: mod_base = OTHER; note = 2'-deoxy-2'-fluoroadenosine-3'-phosphate
  modified_base 7: mod_base = OTHER; note = 2'-O-methyluridine-3'-phosphate
  modified_base 8: mod_base = OTHER; note = 2'-deoxy-2'-fluoroguanosine-3'-phosphate
  modified_base 9: mod_base = OTHER; note = 2'-deoxy-2'-fluorocytidine-3'-phosphate
  modified_base 10: mod_base = OTHER; note = 2'-O-methylcytidine-3'-phosphate
  modified_base 11: mod_base = OTHER; note = 2'-O-methyluridine-3'-phosphate
  modified_base 12: mod_base = OTHER; note = 2'-O-methylcytidine-3'-phosphate
  modified_base 13: mod_base = OTHER; note = 2'-O-methyluridine-3'-phosphate
  modified_base 14: mod_base = OTHER; note = 2'-deoxy-2'-fluorocytidine-3'-phosphate
  modified_base 15: mod_base = OTHER; note = 2'-O-methyluridine-3'-phosphate
  modified_base 16: mod_base = OTHER; note = 2'-deoxy-2'-fluorouridine-3'-phosphate
  modified_base 17: mod_base = OTHER; note = 2'-O-methylcytidine-3'-phosphate
  modified_base 18: mod_base = OTHER; note = 2'-O-methyladenosine-3'-phosphate
  modified_base 19: mod_base = OTHER; note = 2'-O-methyluridine-3'-phosphate
  modified_base 20: mod_base = OTHER; note = 2'-O-methylcytidine-3'-phosphate
  modified_base 21: mod_base = OTHER; note = 2'-O-methylcytidine-3'-phosphorothioate
  modified_base 22: mod_base = OTHER; note = 2'-O-methyluridine-3'-phosphorothioate
  modified_base 23: mod_base = OTHER; note = 2'-O-methyluridine
acaacatgcctctcttcatcctt

SEQ ID NO: 714 - RNA, 23 nt, synthetic construct
  source 1..23: mol_type = other RNA
  modified_base 1: mod_base = OTHER; note = 2'-O-methyladenosine-3'-phosphorothioate
  modified_base 2: mod_base = OTHER; note = 2'-deoxy-2'-fluorouridine-3'-phosphorothioate
  modified_base 3: mod_base = OTHER; note = 2'-O-methylcytidine-3'-phosphate
  modified_base 4: mod_base = OTHER; note = 2'-O-methylcytidine-3'-phosphate
  modified_base 5: mod_base = OTHER; note = 2'-O-methyladenosine-3'-phosphate
  modified_base 6: mod_base = OTHER; note = 2'-deoxy-2'-fluoroadenosine-3'-phosphate
  modified_base 7: mod_base = OTHER; note = 2'-O-methylcytidine-3'-phosphate
  modified_base 8: mod_base = OTHER; note = 2'-deoxy-2'-fluoroadenosine-3'-phosphate
  modified_base 9: mod_base = OTHER; note = 2'-deoxy-2'-fluorouridine-3'-phosphate
  modified_base 10: mod_base = OTHER; note = 2'-O-methylguanosine-3'-phosphate
  modified_base 11: mod_base = OTHER; note = 2'-O-methylcytidine-3'-phosphate
  modified_base 12: mod_base = OTHER; note = 2'-O-methylcytidine-3'-phosphate
  modified_base 13: mod_base = OTHER; note = 2'-O-methyluridine-3'-phosphate
  modified_base 14: mod_base = OTHER; note = 2'-deoxy-2'-fluorocytidine-3'-phosphate
  modified_base 15: mod_base = OTHER; note = 2'-O-methyluridine-3'-phosphate
  modified_base 16: mod_base = OTHER; note = 2'-deoxy-2'-fluorocytidine-3'-phosphate
  modified_base 17: mod_base = OTHER; note = 2'-O-methyluridine-3'-phosphate
  modified_base 18: mod_base = OTHER; note = 2'-O-methyluridine-3'-phosphate
  modified_base 19: mod_base = OTHER; note = 2'-O-methylcytidine-3'-phosphate
  modified_base 20: mod_base = OTHER; note = 2'-O-methyladenosine-3'-phosphate
  modified_base 21: mod_base = OTHER; note = 2'-O-methyluridine-3'-phosphorothioate
  modified_base 22: mod_base = OTHER; note = 2'-O-methylcytidine-3'-phosphorothioate
  modified_base 23: mod_base = OTHER; note = 2'-O-methylcytidine
atccaacatgcctctcttcatcc

SEQ ID NO: 715 - RNA, 23 nt, synthetic construct
  source 1..23: mol_type = other RNA
  modified_base 1: mod_base = OTHER; note = 2'-O-methyladenosine-3'-phosphorothioate
  modified_base 2: mod_base = OTHER; note = 2'-deoxy-2'-fluoroguanosine-3'-phosphorothioate
  modified_base 3: mod_base = OTHER; note = 2'-O-methyluridine-3'-phosphate
  modified_base 4: mod_base = OTHER; note = 2'-O-methylcytidine-3'-phosphate
  modified_base 5: mod_base = OTHER; note = 2'-O-methyluridine-3'-phosphate
  modified_base 6: mod_base = OTHER; note = 2'-deoxy-2'-fluorocytidine-3'-phosphate
  modified_base 7: mod_base = OTHER; note = 2'-O-methylcytidine-3'-phosphate
  modified_base 8: mod_base = OTHER; note = 2'-deoxy-2'-fluoroadenosine-3'-phosphate
  modified_base 9: mod_base = OTHER; note = 2'-deoxy-2'-fluoroadenosine-3'-phosphate
  modified_base 10: mod_base = OTHER; note = 2'-O-methylcytidine-3'-phosphate
  modified_base 11: mod_base = OTHER; note = 2'-O-methyladenosine-3'-phosphate
  modified_base 12: mod_base = OTHER; note = 2'-O-methyluridine-3'-phosphate
  modified_base 13: mod_base = OTHER; note = 2'-O-methylguanosine-3'-phosphate
  modified_base 14: mod_base = OTHER; note = 2'-deoxy-2'-fluorocytidine-3'-phosphate
  modified_base 15: mod_base = OTHER; note = 2'-O-methylcytidine-3'-phosphate
  modified_base 16: mod_base = OTHER; note = 2'-deoxy-2'-fluorouridine-3'-phosphate
  modified_base 17: mod_base = OTHER; note = 2'-O-methylcytidine-3'-phosphate
  modified_base 18: mod_base = OTHER; note = 2'-O-methyluridine-3'-phosphate
  modified_base 19: mod_base = OTHER; note = 2'-O-methylcytidine-3'-phosphate
  modified_base 20: mod_base = OTHER; note = 2'-O-methyluridine-3'-phosphate
  modified_base 21: mod_base = OTHER; note = 2'-O-methyluridine-3'-phosphorothioate
  modified_base 22: mod_base = OTHER; note = 2'-O-methylcytidine-3'-phosphorothioate
  modified_base 23: mod_base = OTHER; note = 2'-O-methyladenosine
agtctccaacatgcctctcttca

SEQ ID NO: 716 - RNA, 23 nt, synthetic construct
  source 1..23: mol_type = other RNA
  modified_base 1: mod_base = OTHER; note = 2'-O-methyluridine-3'-phosphorothioate
  modified_base 2: mod_base = OTHER; note = 2'-deoxy-2'-fluorocytidine-3'-phosphorothioate
  modified_base 3: mod_base = OTHER; note = 2'-O-methylcytidine-3'-phosphate
  modified_base 4: mod_base = OTHER; note = 2'-O-methyladenosine-3'-phosphate
  modified_base 5: mod_base = OTHER; note = 2'-O-methylcytidine-3'-phosphate
  modified_base 6: mod_base = OTHER; note = 2'-deoxy-2'-fluorocytidine-3'-phosphate
  modified_base 7: mod_base = OTHER; note = 2'-O-methyluridine-3'-phosphate
  modified_base 8: mod_base = OTHER; note = 2'-deoxy-2'-fluorouridine-3'-phosphate
  modified_base 9: mod_base = OTHER; note = 2'-deoxy-2'-fluorouridine-3'-phosphate
  modified_base 10: mod_base = OTHER; note = 2'-O-methylguanosine-3'-phosphate
  modified_base 11: mod_base = OTHER; note = 2'-O-methylcytidine-3'-phosphate
  modified_base 12: mod_base = OTHER; note = 2'-O-methylcytidine-3'-phosphate
  modified_base 13: mod_base = OTHER; note = 2'-O-methylcytidine-3'-phosphate
  modified_base 14: mod_base = OTHER; note = 2'-deoxy-2'-fluoroadenosine-3'-phosphate
  modified_base 15: mod_base = OTHER; note = 2'-O-methyladenosine-3'-phosphate
  modified_base 16: mod_base = OTHER; note = 2'-deoxy-2'-fluoroguanosine-3'-phosphate
  modified_base 17: mod_base = OTHER; note = 2'-O-methyluridine-3'-phosphate
  modified_base 18: mod_base = OTHER; note = 2'-O-methylcytidine-3'-phosphate
  modified_base 19: mod_base = OTHER; note = 2'-O-methyladenosine-3'-phosphate
  modified_base 20: mod_base = OTHER; note = 2'-O-methyluridine-3'-phosphate
  modified_base 21: mod_base = OTHER; note = 2'-O-methylcytidine-3'-phosphorothioate
  modified_base 22: mod_base = OTHER; note = 2'-O-methyluridine-3'-phosphorothioate
  modified_base 23: mod_base = OTHER; note = 2'-O-methylguanosine
tccacctttgcccaagtcatctg

SEQ ID NO: 717 - RNA, 23 nt, synthetic construct
  source 1..23: mol_type = other RNA
  modified_base 1: mod_base = OTHER; note = 2'-O-methyladenosine-3'-phosphorothioate
  modified_base 2: mod_base = OTHER; note = 2'-deoxy-2'-fluorouridine-3'-phosphorothioate
  modified_base 3: mod_base = OTHER; note = 2'-O-methylcytidine-3'-phosphate
  modified_base 4: mod_base = OTHER; note = 2'-O-methyluridine-3'-phosphate
  modified_base 5: mod_base = OTHER; note = 2'-O-methylguanosine-3'-phosphate
  modified_base 6: mod_base = OTHER; note = 2'-deoxy-2'-fluorocytidine-3'-phosphate
  modified_base 7: mod_base = OTHER; note = 2'-O-methyluridine-3'-phosphate
  modified_base 8: mod_base = OTHER; note = 2'-deoxy-2'-fluorouridine-3'-phosphate
  modified_base 9: mod_base = OTHER; note = 2'-deoxy-2'-fluorouridine-3'-phosphate
  modified_base 10: mod_base = OTHER; note = 2'-O-methyluridine-3'-phosphate
  modified_base 11: mod_base = OTHER; note = 2'-O-methyluridine-3'-phosphate
  modified_base 12: mod_base = OTHER; note = 2'-O-methylcytidine-3'-phosphate
  modified_base 13: mod_base = OTHER; note = 2'-O-methyladenosine-3'-phosphate
  modified_base 14: mod_base = OTHER; note = 2'-deoxy-2'-fluorouridine-3'-phosphate
  modified_base 15: mod_base = OTHER; note = 2'-O-methylguanosine-3'-phosphate
  modified_base 16: mod_base = OTHER; note = 2'-deoxy-2'-fluoroguanosine-3'-phosphate
  modified_base 17: mod_base = OTHER; note = 2'-O-methyladenosine-3'-phosphate
  modified_base 18: mod_base = OTHER; note = 2'-O-methylcytidine-3'-phosphate
  modified_base 19: mod_base = OTHER; note = 2'-O-methylcytidine-3'-phosphate
  modified_base 20: mod_base = OTHER; note = 2'-O-methyladenosine-3'-phosphate
  modified_base 21: mod_base = OTHER; note = 2'-O-methylcytidine-3'-phosphorothioate
  modified_base 22: mod_base = OTHER; note = 2'-O-methylcytidine-3'-phosphorothioate
  modified_base 23: mod_base = OTHER; note = 2'-O-methyladenosine
atctgctttttcatggaccacca

SEQ ID NO: 718 - RNA, 23 nt, synthetic construct
  source 1..23: mol_type = other RNA
  modified_base 1: mod_base = OTHER; note = 2'-O-methyladenosine-3'-phosphorothioate
  modified_base 2: mod_base = OTHER; note = 2'-deoxy-2'-fluoroadenosine-3'-phosphorothioate
  modified_base 3: mod_base = OTHER; note = 2'-O-methyluridine-3'-phosphate
  modified_base 4: mod_base = OTHER; note = 2'-O-methylcytidine-3'-phosphate
  modified_base 5: mod_base = OTHER; note = 2'-O-methyluridine-3'-phosphate
  modified_base 6: mod_base = OTHER; note = 2'-deoxy-2'-fluoroguanosine-3'-phosphate
  modified_base 7: mod_base = OTHER; note = 2'-O-methylcytidine-3'-phosphate
  modified_base 8: mod_base = OTHER; note = 2'-deoxy-2'-fluorouridine-3'-phosphate
  modified_base 9: mod_base = OTHER; note = 2'-deoxy-2'-fluorouridine-3'-phosphate
  modified_base 10: mod_base = OTHER; note = 2'-O-methyluridine-3'-phosphate
  modified_base 11: mod_base = OTHER; note = 2'-O-methyluridine-3'-phosphate
  modified_base 12: mod_base = OTHER; note = 2'-O-methyluridine-3'-phosphate
  modified_base 13: mod_base = OTHER; note = 2'-O-methylcytidine-3'-phosphate
  modified_base 14: mod_base = OTHER; note = 2'-deoxy-2'-fluoroadenosine-3'-phosphate
  modified_base 15: mod_base = OTHER; note = 2'-O-methyluridine-3'-phosphate
  modified_base 16: mod_base = OTHER; note = 2'-deoxy-2'-fluoroguanosine-3'-phosphate
  modified_base 17: mod_base = OTHER; note = 2'-O-methylguanosine-3'-phosphate
  modified_base 18: mod_base = OTHER; note = 2'-O-methyladenosine-3'-phosphate
  modified_base 19: mod_base = OTHER; note = 2'-O-methylcytidine-3'-phosphate
  modified_base 20: mod_base = OTHER; note = 2'-O-methylcytidine-3'-phosphate
  modified_base 21: mod_base = OTHER; note = 2'-O-methyladenosine-3'-phosphorothioate
  modified_base 22: mod_base = OTHER; note = 2'-O-methylcytidine-3'-phosphorothioate
  modified_base 23: mod_base = OTHER; note = 2'-O-methylcytidine
aatctgctttttcatggaccacc

SEQ ID NO: 719 - RNA, 23 nt, synthetic construct
  source 1..23: mol_type = other RNA
  modified_base 1: mod_base = OTHER; note = 2'-O-methyluridine-3'-phosphorothioate
  modified_base 2: mod_base = OTHER; note = 2'-deoxy-2'-fluorocytidine-3'-phosphorothioate
  modified_base 3: mod_base = OTHER; note = 2'-O-methyladenosine-3'-phosphate
  modified_base 4: mod_base = OTHER; note = 2'-O-methyluridine-3'-phosphate
  modified_base 5: mod_base = OTHER; note = 2'-O-methylcytidine-3'-phosphate
  modified_base 6: mod_base = OTHER; note = 2'-deoxy-2'-fluorouridine-3'-phosphate
  modified_base 7: mod_base = OTHER; note = 2'-O-methylguanosine-3'-phosphate
  modified_base 8: mod_base = OTHER; note = 2'-deoxy-2'-fluorocytidine-3'-phosphate
  modified_base 9: mod_base = OTHER; note = 2'-deoxy-2'-fluorouridine-3'-phosphate
  modified_base 10: mod_base = OTHER; note = 2'-O-methyluridine-3'-phosphate
  modified_base 11: mod_base = OTHER; note = 2'-O-methyluridine-3'-phosphate
  modified_base 12: mod_base = OTHER; note = 2'-O-methyluridine-3'-phosphate
  modified_base 13: mod_base = OTHER; note = 2'-O-methyluridine-3'-phosphate
  modified_base 14: mod_base = OTHER; note = 2'-deoxy-2'-fluorocytidine-3'-phosphate
  modified_base 15: mod_base = OTHER; note = 2'-O-methyladenosine-3'-phosphate
  modified_base 16: mod_base = OTHER; note = 2'-deoxy-2'-fluorouridine-3'-phosphate
  modified_base 17: mod_base = OTHER; note = 2'-O-methylguanosine-3'-phosphate
  modified_base 18: mod_base = OTHER; note = 2'-O-methylguanosine-3'-phosphate
  modified_base 19: mod_base = OTHER; note = 2'-O-methyladenosine-3'-phosphate
  modified_base 20: mod_base = OTHER; note = 2'-O-methylcytidine-3'-phosphate
  modified_base 21: mod_base = OTHER; note = 2'-O-methylcytidine-3'-phosphorothioate
  modified_base 22: mod_base = OTHER; note = 2'-O-methyladenosine-3'-phosphorothioate
  modified_base 23: mod_base = OTHER; note = 2'-O-methylcytidine
tcatctgctttttcatggaccac

SEQ ID NO: 720 - RNA, 23 nt, synthetic construct
  source 1..23: mol_type = other RNA
  modified_base 1: mod_base = OTHER; note = 2'-O-methyladenosine-3'-phosphorothioate
  modified_base 2: mod_base = OTHER; note = 2'-deoxy-2'-fluorocytidine-3'-phosphorothioate
  modified_base 3: mod_base = OTHER; note = 2'-O-methylcytidine-3'-phosphate
  modified_base 4: mod_base = OTHER; note = 2'-O-methyluridine-3'-phosphate
  modified_base 5: mod_base = OTHER; note = 2'-O-methyluridine-3'-phosphate
  modified_base 6: mod_base = OTHER; note = 2'-deoxy-2'-fluorouridine-3'-phosphate
  modified_base 7: mod_base = OTHER; note = 2'-O-methylguanosine-3'-phosphate
  modified_base 8: mod_base = OTHER; note = 2'-deoxy-2'-fluorocytidine-3'-phosphate
  modified_base 9: mod_base = OTHER; note = 2'-deoxy-2'-fluorocytidine-3'-phosphate
  modified_base 10: mod_base = OTHER; note = 2'-O-methylcytidine-3'-phosphate
  modified_base 11: mod_base = OTHER; note = 2'-O-methyladenosine-3'-phosphate
  modified_base 12: mod_base = OTHER; note = 2'-O-methyladenosine-3'-phosphate
  modified_base 13: mod_base = OTHER; note = 2'-O-methylguanosine-3'-phosphate
  modified_base 14: mod_base = OTHER; note = 2'-deoxy-2'-fluorouridine-3'-phosphate
  modified_base 15: mod_base = OTHER; note = 2'-O-methylcytidine-3'-phosphate
  modified_base 16: mod_base = OTHER; note = 2'-deoxy-2'-fluoroadenosine-3'-phosphate
  modified_base 17: mod_base = OTHER; note = 2'-O-methyluridine-3'-phosphate
  modified_base 18: mod_base = OTHER; note = 2'-O-methylcytidine-3'-phosphate
  modified_base 19: mod_base = OTHER; note = 2'-O-methyluridine-3'-phosphate
  modified_base 20: mod_base = OTHER; note = 2'-O-methylguanosine-3'-phosphate
  modified_base 21: mod_base = OTHER; note = 2'-O-methylcytidine-3'-phosphorothioate
  modified_base 22: mod_base = OTHER; note = 2'-O-methyluridine-3'-phosphorothioate
  modified_base 23: mod_base = OTHER; note = 2'-O-methyluridine
acctttgcccaagtcatctgctt

SEQ ID NO: 721 - RNA, 23 nt, synthetic construct
  source 1..23: mol_type = other RNA
  modified_base 1: mod_base = OTHER; note = 2'-O-methyladenosine-3'-phosphorothioate
  modified_base 2: mod_base = OTHER; note = 2'-deoxy-2'-fluorocytidine-3'-phosphorothioate
  modified_base 3: mod_base = OTHER; note = 2'-O-methyladenosine-3'-phosphate
  modified_base 4: mod_base = OTHER; note = 2'-O-methylcytidine-3'-phosphate
  modified_base 5: mod_base = OTHER; note = 2'-O-methylcytidine-3'-phosphate
  modified_base 6: mod_base = OTHER; note = 2'-deoxy-2'-fluorouridine-3'-phosphate
  modified_base 7: mod_base = OTHER; note = 2'-O-methyluridine-3'-phosphate
  modified_base 8: mod_base = OTHER; note = 2'-deoxy-2'-fluorouridine-3'-phosphate
  modified_base 9: mod_base = OTHER; note = 2'-deoxy-2'-fluoroguanosine-3'-phosphate
  modified_base 10: mod_base = OTHER; note = 2'-O-methylcytidine-3'-phosphate
  modified_base 11: mod_base = OTHER; note = 2'-O-methylcytidine-3'-phosphate
  modified_base 12: mod_base = OTHER; note = 2'-O-methylcytidine-3'-phosphate
  modified_base 13: mod_base = OTHER; note = 2'-O-methyladenosine-3'-phosphate
  modified_base 14: mod_base = OTHER; note = 2'-deoxy-2'-fluoroadenosine-3'-phosphate
  modified_base 15: mod_base = OTHER; note = 2'-O-methylguanosine-3'-phosphate
  modified_base 16: mod_base = OTHER; note = 2'-deoxy-2'-fluorouridine-3'-phosphate
  modified_base 17: mod_base = OTHER; note = 2'-O-methylcytidine-3'-phosphate
  modified_base 18: mod_base = OTHER; note = 2'-O-methyladenosine-3'-phosphate
  modified_base 19: mod_base = OTHER; note = 2'-O-methyluridine-3'-phosphate
  modified_base 20: mod_base = OTHER; note = 2'-O-methylcytidine-3'-phosphate
  modified_base 21: mod_base = OTHER; note = 2'-O-methyluridine-3'-phosphorothioate
  modified_base 22: mod_base = OTHER; note = 2'-O-methylguanosine-3'-phosphorothioate
  modified_base 23: mod_base = OTHER; note = 2'-O-methylcytidine
acacctttgcccaagtcatctgc

SEQ ID NO: 722 - RNA, 23 nt, synthetic construct
  source 1..23: mol_type = other RNA
  modified_base 1: mod_base = OTHER; note = 2'-O-methyladenosine-3'-phosphorothioate
  modified_base 2: mod_base = OTHER; note = 2'-deoxy-2'-fluoroadenosine-3'-phosphorothioate
  modified_base 3: mod_base = OTHER; note = 2'-O-methyluridine-3'-phosphate
  modified_base 4: mod_base = OTHER; note = 2'-O-methyluridine-3'-phosphate
  modified_base 5: mod_base = OTHER; note = 2'-O-methyluridine-3'-phosphate
  modified_base 6: mod_base = OTHER; note = 2'-deoxy-2'-fluorocytidine-3'-phosphate
  modified_base 7: mod_base = OTHER; note = 2'-O-methylcytidine-3'-phosphate
  modified_base 8: mod_base = OTHER; note = 2'-deoxy-2'-fluoroadenosine-3'-phosphate
  modified_base 9: mod_base = OTHER; note = 2'-deoxy-2'-fluorocytidine-3'-phosphate
  modified_base 10: mod_base = OTHER; note = 2'-O-methylcytidine-3'-phosphate
  modified_base 11: mod_base = OTHER; note = 2'-O-methyluridine-3'-phosphate
  modified_base 12: mod_base = OTHER; note = 2'-O-methyluridine-3'-phosphate
  modified_base 13: mod_base = OTHER; note = 2'-O-methyluridine-3'-phosphate
  modified_base 14: mod_base = OTHER; note = 2'-deoxy-2'-fluoroguanosine-3'-phosphate
  modified_base 15: mod_base = OTHER; note = 2'-O-methylcytidine-3'-phosphate
  modified_base 16: mod_base = OTHER; note = 2'-deoxy-2'-fluorocytidine-3'-phosphate
  modified_base 17: mod_base = OTHER; note = 2'-O-methylcytidine-3'-phosphate
  modified_base 18: mod_base = OTHER; note = 2'-O-methyladenosine-3'-phosphate
  modified_base 19: mod_base = OTHER; note = 2'-O-methyladenosine-3'-phosphate
  modified_base 20: mod_base = OTHER; note = 2'-O-methylguanosine-3'-phosphate
  modified_base 21: mod_base = OTHER; note = 2'-O-methyluridine-3'-phosphorothioate
  modified_base 22: mod_base = OTHER; note = 2'-O-methylcytidine-3'-phosphorothioate
  modified_base 23: mod_base = OTHER; note = 2'-O-methyladenosine
aatttccacctttgcccaagtca

SEQ ID NO: 723 - RNA, 23 nt, synthetic construct
  source 1..23: mol_type = other RNA
  modified_base 1: mod_base = OTHER; note = 2'-O-methyladenosine-3'-phosphorothioate
  modified_base 2: mod_base = OTHER; note = 2'-deoxy-2'-fluoroadenosine-3'-phosphorothioate
  modified_base 3: mod_base = OTHER; note = 2'-O-methyluridine-3'-phosphate
  modified_base 4: mod_base = OTHER; note = 2'-O-methylcytidine-3'-phosphate
  modified_base 5: mod_base = OTHER; note = 2'-O-methylcytidine-3'-phosphate
  modified_base 6: mod_base = OTHER; note = 2'-deoxy-2'-fluorocytidine-3'-phosphate
  modified_base 7: mod_base = OTHER; note = 2'-O-methyladenosine-3'-phosphate
  modified_base 8: mod_base = OTHER; note = 2'-deoxy-2'-fluoroadenosine-3'-phosphate
  modified_base 9: mod_base = OTHER; note = 2'-deoxy-2'-fluorouridine-3'-phosphate
  modified_base 10: mod_base = OTHER; note = 2'-O-methyluridine-3'-phosphate
  modified_base 11: mod_base = OTHER; note = 2'-O-methyladenosine-3'-phosphate
  modified_base 12: mod_base = OTHER; note = 2'-O-methylcytidine-3'-phosphate
  modified_base 13: mod_base = OTHER; note = 2'-O-methyladenosine-3'-phosphate
  modified_base 14: mod_base = OTHER; note = 2'-deoxy-2'-fluorocytidine-3'-phosphate
  modified_base 15: mod_base = OTHER; note = 2'-O-methylcytidine-3'-phosphate
  modified_base 16: mod_base = OTHER; note = 2'-deoxy-2'-fluoroadenosine-3'-phosphate
  modified_base 17: mod_base = OTHER; note = 2'-O-methylcytidine-3'-phosphate
  modified_base 18: mod_base = OTHER; note = 2'-O-methyladenosine-3'-phosphate
  modified_base 19: mod_base = OTHER; note = 2'-O-methyladenosine-3'-phosphate
  modified_base 20: mod_base = OTHER; note = 2'-O-methylguanosine-3'-phosphate
  modified_base 21: mod_base = OTHER; note = 2'-O-methylcytidine-3'-phosphorothioate
  modified_base 22: mod_base = OTHER; note = 2'-O-methylcytidine-3'-phosphorothioate
  modified_base 23: mod_base = OTHER; note = 2'-O-methyladenosine
aatcccaattacaccacaagcca

SEQ ID NO: 724 - RNA, 23 nt, synthetic construct
  source 1..23: mol_type = other RNA
  modified_base 1: mod_base = OTHER; note = 2'-O-methyladenosine-3'-phosphorothioate
  modified_base 2: mod_base = OTHER; note = 2'-deoxy-2'-fluoroguanosine-3'-phosphorothioate
  modified_base 3: mod_base = OTHER; note = 2'-O-methyladenosine-3'-phosphate
  modified_base 4: mod_base = OTHER; note = 2'-O-methyluridine-3'-phosphate
  modified_base 5: mod_base = OTHER; note = 2'-O-methylcytidine-3'-phosphate
  modified_base 6: mod_base = OTHER; note = 2'-deoxy-2'-fluorocytidine-3'-phosphate
  modified_base 7: mod_base = OTHER; note = 2'-O-methylcytidine-3'-phosphate
  modified_base 8: mod_base = OTHER; note = 2'-deoxy-2'-fluoroadenosine-3'-phosphate
  modified_base 9: mod_base = OTHER; note = 2'-deoxy-2'-fluoroadenosine-3'-phosphate
  modified_base 10: mod_base = OTHER; note = 2'-O-methyluridine-3'-phosphate
  modified_base 11: mod_base = OTHER; note = 2'-O-methyluridine-3'-phosphate
  modified_base 12: mod_base = OTHER; note = 2'-O-methyladenosine-3'-phosphate
  modified_base 13: mod_base = OTHER; note = 2'-O-methylcytidine-3'-phosphate
  modified_base 14: mod_base = OTHER; note = 2'-deoxy-2'-fluoroadenosine-3'-phosphate
  modified_base 15: mod_base = OTHER; note = 2'-O-methylcytidine-3'-phosphate
  modified_base 16: mod_base = OTHER; note = 2'-deoxy-2'-fluorocytidine-3'-phosphate
  modified_base 17: mod_base = OTHER; note = 2'-O-methyladenosine-3'-phosphate
  modified_base 18: mod_base = OTHER; note = 2'-O-methylcytidine-3'-phosphate
  modified_base 19: mod_base = OTHER; note = 2'-O-methyladenosine-3'-phosphate
  modified_base 20: mod_base = OTHER; note = 2'-O-methyladenosine-3'-phosphate
  modified_base 21: mod_base = OTHER; note = 2'-O-methylguanosine-3'-phosphorothioate
  modified_base 22: mod_base = OTHER; note = 2'-O-methylcytidine-3'-phosphorothioate
  modified_base 23: mod_base = OTHER; note = 2'-O-methylcytidine
agatcccaattacaccacaagcc

SEQ ID NO: 725 - RNA, 23 nt, synthetic construct
  source 1..23: mol_type = other RNA
  modified_base 1: mod_base = OTHER; note = 2'-O-methyladenosine-3'-phosphorothioate
  modified_base 2: mod_base = OTHER; note = 2'-deoxy-2'-fluorocytidine-3'-phosphorothioate
  modified_base 3: mod_base = OTHER; note = 2'-O-methylguanosine-3'-phosphate
  modified_base 4: mod_base = OTHER; note = 2'-O-methyladenosine-3'-phosphate
  modified_base 5: mod_base = OTHER; note = 2'-O-methyluridine-3'-phosphate
  modified_base 6: mod_base = OTHER; note = 2'-deoxy-2'-fluorocytidine-3'-phosphate
  modified_base 7: mod_base = OTHER; note = 2'-O-methylcytidine-3'-phosphate
  modified_base 8: mod_base = OTHER; note = 2'-deoxy-2'-fluorocytidine-3'-phosphate
  modified_base 9: mod_base = OTHER; note = 2'-deoxy-2'-fluoroadenosine-3'-phosphate
  modified_base 10: mod_base = OTHER; note = 2'-O-methyladenosine-3'-phosphate
  modified_base 11: mod_base = OTHER; note = 2'-O-methyluridine-3'-phosphate
  modified_base 12: mod_base = OTHER; note = 2'-O-methyluridine-3'-phosphate
  modified_base 13: mod_base = OTHER; note = 2'-O-methyladenosine-3'-phosphate
  modified_base 14: mod_base = OTHER; note = 2'-deoxy-2'-fluorocytidine-3'-phosphate
  modified_base 15: mod_base = OTHER; note = 2'-O-methyladenosine-3'-phosphate
  modified_base 16: mod_base = OTHER; note = 2'-deoxy-2'-fluorocytidine-3'-phosphate
  modified_base 17: mod_base = OTHER; note = 2'-O-methylcytidine-3'-phosphate
  modified_base 18: mod_base = OTHER; note = 2'-O-methyladenosine-3'-phosphate
  modified_base 19: mod_base = OTHER; note = 2'-O-methylcytidine-3'-phosphate
  modified_base 20: mod_base = OTHER; note = 2'-O-methyladenosine-3'-phosphate
  modified_base 21: mod_base = OTHER; note = 2'-O-methyladenosine-3'-phosphorothioate
  modified_base 22: mod_base = OTHER; note = 2'-O-methylguanosine-3'-phosphorothioate
  modified_base 23: mod_base = OTHER; note = 2'-O-methylcytidine
acgatcccaattacaccacaagc

SEQ ID NO: 726 - RNA, 23 nt, synthetic construct
  source 1..23: mol_type = other RNA
  modified_base 1: mod_base = OTHER; note = 2'-O-methyladenosine-3'-phosphorothioate
  modified_base 2: mod_base = OTHER; note = 2'-deoxy-2'-fluoroguanosine-3'-phosphorothioate
  modified_base 3: mod_base = OTHER; note = 2'-O-methylcytidine-3'-phosphate
  modified_base 4: mod_base = OTHER; note = 2'-O-methylguanosine-3'-phosphate
  modified_base 5: mod_base = OTHER; note = 2'-O-methyladenosine-3'-phosphate
  modified_base 6: mod_base = OTHER; note = 2'-deoxy-2'-fluorouridine-3'-phosphate
  modified_base 7: mod_base = OTHER; note = 2'-O-methylcytidine-3'-phosphate
  modified_base 8: mod_base = OTHER; note = 2'-deoxy-2'-fluorocytidine-3'-phosphate
  modified_base 9: mod_base = OTHER; note = 2'-deoxy-2'-fluorocytidine-3'-phosphate
  modified_base 10: mod_base = OTHER; note = 2'-O-methyladenosine-3'-phosphate
  modified_base 11: mod_base = OTHER; note = 2'-O-methyladenosine-3'-phosphate
  modified_base 12: mod_base = OTHER; note = 2'-O-methyluridine-3'-phosphate
  modified_base 13: mod_base = OTHER; note = 2'-O-methyluridine-3'-phosphate
  modified_base 14: mod_base = OTHER; note = 2'-deoxy-2'-fluoroadenosine-3'-phosphate
  modified_base 15: mod_base = OTHER; note = 2'-O-methylcytidine-3'-phosphate
  modified_base 16: mod_base = OTHER; note = 2'-deoxy-2'-fluoroadenosine-3'-phosphate
  modified_base 17: mod_base = OTHER; note = 2'-O-methylcytidine-3'-phosphate
  modified_base 18: mod_base = OTHER; note = 2'-O-methylcytidine-3'-phosphate
  modified_base 19: mod_base = OTHER; note = 2'-O-methyladenosine-3'-phosphate
  modified_base 20: mod_base = OTHER; note = 2'-O-methylcytidine-3'-phosphate
  modified_base 21: mod_base = OTHER; note = 2'-O-methyladenosine-3'-phosphorothioate
  modified_base 22: mod_base = OTHER; note = 2'-O-methyladenosine-3'-phosphorothioate
  modified_base 23: mod_base = OTHER; note = 2'-O-methylguanosine
agcgatcccaattacaccacaag

SEQ ID NO: 727 - RNA, 23 nt, synthetic construct
  source 1..23: mol_type = other RNA
  modified_base 1: mod_base = OTHER; note = 2'-O-methyladenosine-3'-phosphorothioate
  modified_base 2: mod_base = OTHER; note = 2'-deoxy-2'-fluoroguanosine-3'-phosphorothioate
  modified_base 3: mod_base = OTHER; note = 2'-O-methylguanosine-3'-phosphate
  modified_base 4: mod_base = OTHER; note = 2'-O-methylcytidine-3'-phosphate
  modified_base 5: mod_base = OTHER; note = 2'-O-methylguanosine-3'-phosphate
  modified_base 6: mod_base = OTHER; note = 2'-deoxy-2'-fluoroadenosine-3'-phosphate
  modified_base 7: mod_base = OTHER; note = 2'-O-methyluridine-3'-phosphate
  modified_base 8: mod_base = OTHER; note = 2'-deoxy-2'-fluorocytidine-3'-phosphate
  modified_base 9: mod_base = OTHER; note = 2'-deoxy-2'-fluorocytidine-3'-phosphate
  modified_base 10: mod_base = OTHER; note = 2'-O-methylcytidine-3'-phosphate
  modified_base 11: mod_base = OTHER; note = 2'-O-methyladenosine-3'-phosphate
  modified_base 12: mod_base = OTHER; note = 2'-O-methyladenosine-3'-phosphate
  modified_base 13: mod_base = OTHER; note = 2'-O-methyluridine-3'-phosphate
  modified_base 14: mod_base = OTHER; note = 2'-deoxy-2'-fluorouridine-3'-phosphate
  modified_base 15: mod_base = OTHER; note = 2'-O-methyladenosine-3'-phosphate
  modified_base 16: mod_base = OTHER; note = 2'-deoxy-2'-fluorocytidine-3'-phosphate
  modified_base 17: mod_base = OTHER; note = 2'-O-methyladenosine-3'-phosphate
  modified_base 18: mod_base = OTHER; note = 2'-O-methylcytidine-3'-phosphate
  modified_base 19: mod_base = OTHER; note = 2'-O-methylcytidine-3'-phosphate
  modified_base 20: mod_base = OTHER; note = 2'-O-methyladenosine-3'-phosphate
  modified_base 21: mod_base = OTHER; note = 2'-O-methylcytidine-3'-phosphorothioate
  modified_base 22: mod_base = OTHER; note = 2'-O-methyladenosine-3'-phosphorothioate
  modified_base 23: mod_base = OTHER; note = 2'-O-methyladenosine
aggcgatcccaattacaccacaa

SEQ ID NO: 728 - RNA, 23 nt, synthetic construct
  source 1..23: mol_type = other RNA
  modified_base 1: mod_base = OTHER; note = 2'-O-methyladenosine-3'-phosphorothioate
  modified_base 2: mod_base = OTHER; note = 2'-deoxy-2'-fluoroguanosine-3'-phosphorothioate
  modified_base 3: mod_base = OTHER; note = 2'-O-methyladenosine-3'-phosphate
  modified_base 4: mod_base = OTHER; note = 2'-O-methyladenosine-3'-phosphate
  modified_base 5: mod_base = OTHER; note = 2'-O-methyladenosine-3'-phosphate
  modified_base 6: mod_base = OTHER; note = 2'-deoxy-2'-fluorouridine-3'-phosphate
  modified_base 7: mod_base = OTHER; note = 2'-O-methyluridine-3'-phosphate
  modified_base 8: mod_base = OTHER; note = 2'-deoxy-2'-fluoroguanosine-3'-phosphate
  modified_base 9: mod_base = OTHER; note = 2'-deoxy-2'-fluoroadenosine-3'-phosphate
  modified_base 10: mod_base = OTHER; note = 2'-O-methyluridine-3'-phosphate
  modified_base 11: mod_base = OTHER; note = 2'-O-methylguanosine-3'-phosphate
  modified_base 12: mod_base = OTHER; note = 2'-O-methyladenosine-3'-phosphate
  modified_base 13: mod_base = OTHER; note = 2'-O-methyluridine-3'-phosphate
  modified_base 14: mod_base = OTHER; note = 2'-deoxy-2'-fluoroguanosine-3'-phosphate
  modified_base 15: mod_base = OTHER; note = 2'-O-methylcytidine-3'-phosphate
  modified_base 16: mod_base = OTHER; note = 2'-deoxy-2'-fluorocytidine-3'-phosphate
  modified_base 17: mod_base = OTHER; note = 2'-O-methylcytidine-3'-phosphate
  modified_base 18: mod_base = OTHER; note = 2'-O-methyluridine-3'-phosphate
  modified_base 19: mod_base = OTHER; note = 2'-O-methylguanosine-3'-phosphate
  modified_base 20: mod_base = OTHER; note = 2'-O-methylcytidine-3'-phosphate
  modified_base 21: mod_base = OTHER; note = 2'-O-methyladenosine-3'-phosphorothioate
  modified_base 22: mod_base = OTHER; note = 2'-O-methylcytidine-3'-phosphorothioate
  modified_base 23: mod_base = OTHER; note = 2'-O-methyluridine
agaaattgatgatgccctgcact

SEQ ID NO: 729 - RNA, 23 nt, synthetic construct
  source 1..23: mol_type = other RNA
  modified_base 1: mod_base = OTHER; note = 2'-O-methyluridine-3'-phosphorothioate
  modified_base 2: mod_base = OTHER; note = 2'-deoxy-2'-fluorocytidine-3'-phosphorothioate
  modified_base 3: mod_base = OTHER; note = 2'-O-methylguanosine-3'-phosphate
  modified_base 4: mod_base = OTHER; note = 2'-O-methyladenosine-3'-phosphate
  modified_base 5: mod_base = OTHER; note = 2'-O-methyladenosine-3'-phosphate
  modified_base 6: mod_base = OTHER; note = 2'-deoxy-2'-fluoroadenosine-3'-phosphate
  modified_base 7: mod_base = OTHER; note = 2'-O-methyluridine-3'-phosphate
  modified_base 8: mod_base = OTHER; note = 2'-deoxy-2'-fluorouridine-3'-phosphate
  modified_base 9: mod_base = OTHER; note = 2'-deoxy-2'-fluoroguanosine-3'-phosphate
  modified_base 10: mod_base = OTHER; note = 2'-O-methyladenosine-3'-phosphate
  modified_base 11: mod_base = OTHER; note = 2'-O-methyluridine-3'-phosphate
  modified_base 12: mod_base = OTHER; note = 2'-O-methylguanosine-3'-phosphate
  modified_base 13: mod_base = OTHER; note = 2'-O-methyladenosine-3'-phosphate
  modified_base 14: mod_base = OTHER; note = 2'-deoxy-2'-fluorouridine-3'-phosphate
  modified_base 15: mod_base = OTHER; note = 2'-O-methylguanosine-3'-phosphate
  modified_base 16: mod_base = OTHER; note = 2'-deoxy-2'-fluorocytidine-3'-phosphate
  modified_base 17: mod_base = OTHER; note = 2'-O-methylcytidine-3'-phosphate
  modified_base 18: mod_base = OTHER; note = 2'-O-methylcytidine-3'-phosphate
  modified_base 19: mod_base = OTHER; note = 2'-O-methyluridine-3'-phosphate
  modified_base 20: mod_base = OTHER; note = 2'-O-methylguanosine-3'-phosphate
  modified_base 21: mod_base = OTHER; note = 2'-O-methylcytidine-3'-phosphorothioate
  modified_base 22: mod_base = OTHER; note = 2'-O-methyladenosine-3'-phosphorothioate
  modified_base 23: mod_base = OTHER; note = 2'-O-methylcytidine
tcgaaattgatgatgccctgcac

SEQ ID NO: 730 - RNA, 23 nt, synthetic construct
  source 1..23: mol_type = other RNA
  modified_base 1: mod_base = OTHER; note = 2'-O-methyladenosine-3'-phosphorothioate
  modified_base 2: mod_base = OTHER; note = 2'-deoxy-2'-fluorouridine-3'-phosphorothioate
  modified_base 3: mod_base = OTHER; note = 2'-O-methylcytidine-3'-phosphate
  modified_base 4: mod_base = OTHER; note = 2'-O-methylguanosine-3'-phosphate
  modified_base 5: mod_base = OTHER; note = 2'-O-methyladenosine-3'-phosphate
  modified_base 6: mod_base = OTHER; note = 2'-deoxy-2'-fluoroadenosine-3'-phosphate
  modified_base 7: mod_base = OTHER; note = 2'-O-methyladenosine-3'-phosphate
  modified_base 8: mod_base = OTHER; note = 2'-deoxy-2'-fluorouridine-3'-phosphate
  modified_base 9: mod_base = OTHER; note = 2'-deoxy-2'-fluorouridine-3'-phosphate
  modified_base 10: mod_base = OTHER; note = 2'-O-methylguanosine-3'-phosphate
  modified_base 11: mod_base = OTHER; note = 2'-O-methyladenosine-3'-phosphate
  modified_base 12: mod_base = OTHER; note = 2'-O-methyluridine-3'-phosphate
  modified_base 13: mod_base = OTHER; note = 2'-O-methylguanosine-3'-phosphate
  modified_base 14: mod_base = OTHER; note = 2'-deoxy-2'-fluoroadenosine-3'-phosphate
  modified_base 15: mod_base = OTHER; note = 2'-O-methyluridine-3'-phosphate
  modified_base 16: mod_base = OTHER; note = 2'-deoxy-2'-fluoroguanosine-3'-phosphate
  modified_base 17: mod_base = OTHER; note = 2'-O-methylcytidine-3'-phosphate
  modified_base 18: mod_base = OTHER; note = 2'-O-methylcytidine-3'-phosphate
  modified_base 19: mod_base = OTHER; note = 2'-O-methylcytidine-3'-phosphate
  modified_base 20: mod_base = OTHER; note = 2'-O-methyluridine-3'-phosphate
  modified_base 21: mod_base = OTHER; note = 2'-O-methylguanosine-3'-phosphorothioate
  modified_base 22: mod_base = OTHER; note = 2'-O-methylcytidine-3'-phosphorothioate
  modified_base 23: mod_base = OTHER; note = 2'-O-methyladenosine
atcgaaattgatgatgccctgca

SEQ ID NO: 731 - RNA, 23 nt, synthetic construct
  source 1..23: mol_type = other RNA
  modified_base 1: mod_base = OTHER; note = 2'-O-methyladenosine-3'-phosphorothioate
  modified_base 2: mod_base = OTHER; note = 2'-deoxy-2'-fluorocytidine-3'-phosphorothioate
  modified_base 3: mod_base = OTHER; note = 2'-O-methyluridine-3'-phosphate
  modified_base 4: mod_base = OTHER; note = 2'-O-methylcytidine-3'-phosphate
  modified_base 5: mod_base = OTHER; note = 2'-O-methylguanosine-3'-phosphate
  modified_base 6: mod_base = OTHER; note = 2'-deoxy-2'-fluoroadenosine-3'-phosphate
  modified_base 7: mod_base = OTHER; note = 2'-O-methyladenosine-3'-phosphate
  modified_base 8: mod_base = OTHER; note = 2'-deoxy-2'-fluoroadenosine-3'-phosphate
  modified_base 9: mod_base = OTHER; note = 2'-deoxy-2'-fluorouridine-3'-phosphate
  modified_base 10: mod_base = OTHER; note = 2'-O-methyluridine-3'-phosphate
  modified_base 11: mod_base = OTHER; note = 2'-O-methylguanosine-3'-phosphate
  modified_base 12: mod_base = OTHER; note = 2'-O-methyladenosine-3'-phosphate
  modified_base 13: mod_base = OTHER; note = 2'-O-methyluridine-3'-phosphate
  modified_base 14: mod_base = OTHER; note = 2'-deoxy-2'-fluoroguanosine-3'-phosphate
  modified_base 15: mod_base = OTHER; note = 2'-O-methyladenosine-3'-phosphate
  modified_base 16: mod_base = OTHER; note = 2'-deoxy-2'-fluorouridine-3'-phosphate
  modified_base 17: mod_base = OTHER; note = 2'-O-methylguanosine-3'-phosphate
  modified_base 18: mod_base = OTHER; note = 2'-O-methylcytidine-3'-phosphate
  modified_base 19: mod_base = OTHER; note = 2'-O-methylcytidine-3'-phosphate
  modified_base 20: mod_base = OTHER; note = 2'-O-methylcytidine-3'-phosphate
  modified_base 21: mod_base = OTHER; note = 2'-O-methyluridine-3'-phosphorothioate
  modified_base 22: mod_base = OTHER; note = 2'-O-methylguanosine-3'-phosphorothioate
  modified_base 23: mod_base = OTHER; note = 2'-O-methylcytidine
actcgaaattgatgatgccctgc

SEQ ID NO: 732 - RNA, 23 nt, synthetic construct
  source 1..23: mol_type = other RNA
  modified_base 1: mod_base = OTHER; note = 2'-O-methyluridine-3'-phosphorothioate
  modified_base 2: mod_base = OTHER; note = 2'-deoxy-2'-fluoroguanosine-3'-phosphorothioate
  modified_base 3: mod_base = OTHER; note = 2'-O-methylcytidine-3'-phosphate
  modified_base 4: mod_base = OTHER; note = 2'-O-methyluridine-3'-phosphate
  modified_base 5: mod_base = OTHER; note = 2'-O-methylcytidine-3'-phosphate
  modified_base 6: mod_base = OTHER; note = 2'-deoxy-2'-fluoroguanosine-3'-phosphate
  modified_base 7: mod_base = OTHER; note = 2'-O-methyladenosine-3'-phosphate
  modified_base 8: mod_base = OTHER; note = 2'-deoxy-2'-fluoroadenosine-3'-phosphate
  modified_base 9: mod_base = OTHER; note = 2'-deoxy-2'-fluoroadenosine-3'-phosphate
  modified_base 10: mod_base = OTHER; note = 2'-O-methyluridine-3'-phosphate
  modified_base 11: mod_base = OTHER; note = 2'-O-methyluridine-3'-phosphate
  modified_base 12: mod_base = OTHER; note = 2'-O-methylguanosine-3'-phosphate
  modified_base 13: mod_base = OTHER; note = 2'-O-methyladenosine-3'-phosphate
  modified_base 14: mod_base = OTHER; note = 2'-deoxy-2'-fluorouridine-3'-phosphate
  modified_base 15: mod_base = OTHER; note = 2'-O-methylguanosine-3'-phosphate
  modified_base 16: mod_base = OTHER; note = 2'-deoxy-2'-fluoroadenosine-3'-phosphate
  modified_base 17: mod_base = OTHER; note = 2'-O-methyluridine-3'-phosphate
  modified_base 18: mod_base = OTHER; note = 2'-O-methylguanosine-3'-phosphate
  modified_base 19: mod_base = OTHER; note = 2'-O-methylcytidine-3'-phosphate
  modified_base 20: mod_base = OTHER; note = 2'-O-methylcytidine-3'-phosphate
  modified_base 21: mod_base = OTHER; note = 2'-O-methylcytidine-3'-phosphorothioate
  modified_base 22: mod_base = OTHER; note = 2'-O-methyluridine-3'-phosphorothioate
  modified_base 23: mod_base = OTHER; note = 2'-O-methylguanosine
tgctcgaaattgatgatgccctg

SEQ ID NO: 733 - RNA, 23 nt, synthetic construct
  source 1..23: mol_type = other RNA
  modified_base 1: mod_base = OTHER; note = 2'-O-methyladenosine-3'-phosphorothioate
  modified_base 2: mod_base = OTHER; note = 2'-deoxy-2'-fluorouridine-3'-phosphorothioate
  modified_base 3: mod_base = OTHER; note = 2'-O-methylguanosine-3'-phosphate
  modified_base 4: mod_base = OTHER; note = 2'-O-methylcytidine-3'-phosphate
  modified_base 5: mod_base = OTHER; note = 2'-O-methyluridine-3'-phosphate
  modified_base 6: mod_base = OTHER; note = 2'-deoxy-2'-fluorocytidine-3'-phosphate
  modified_base 7: mod_base = OTHER; note = 2'-O-methylguanosine-3'-phosphate
  modified_base 8: mod_base = OTHER; note = 2'-deoxy-2'-fluoroadenosine-3'-phosphate
  modified_base 9: mod_base = OTHER; note = 2'-deoxy-2'-fluoroadenosine-3'-phosphate
  modified_base 10: mod_base = OTHER; note = 2'-O-methyladenosine-3'-phosphate
  modified_base 11: mod_base = OTHER; note = 2'-O-methyluridine-3'-phosphate
  modified_base 12: mod_base = OTHER; note = 2'-O-methyluridine-3'-phosphate
  modified_base 13: mod_base = OTHER; note = 2'-O-methylguanosine-3'-phosphate
  modified_base 14: mod_base = OTHER; note = 2'-deoxy-2'-fluoroadenosine-3'-phosphate
  modified_base 15: mod_base = OTHER; note = 2'-O-methyluridine-3'-phosphate
  modified_base 16: mod_base = OTHER; note = 2'-deoxy-2'-fluoroguanosine-3'-phosphate
  modified_base 17: mod_base = OTHER; note = 2'-O-methyladenosine-3'-phosphate
  modified_base 18: mod_base = OTHER; note = 2'-O-methyluridine-3'-phosphate
  modified_base 19: mod_base = OTHER; note = 2'-O-methylguanosine-3'-phosphate
  modified_base 20: mod_base = OTHER; note = 2'-O-methylcytidine-3'-phosphate
  modified_base 21: mod_base = OTHER; note = 2'-O-methylcytidine-3'-phosphorothioate
  modified_base 22: mod_base = OTHER; note = 2'-O-methylcytidine-3'-phosphorothioate
  modified_base 23: mod_base = OTHER; note = 2'-O-methyluridine
atgctcgaaattgatgatgccct

SEQ ID NO: 734 - RNA, 23 nt, synthetic construct
  source 1..23: mol_type = other RNA
  modified_base 1: mod_base = OTHER; note = 2'-O-methyluridine-3'-phosphorothioate
  modified_base 2: mod_base = OTHER; note = 2'-deoxy-2'-fluorouridine-3'-phosphorothioate
  modified_base 3: mod_base = OTHER; note = 2'-O-methylcytidine-3'-phosphate
  modified_base 4: mod_base = OTHER; note = 2'-O-methyluridine-3'-phosphate
  modified_base 5: mod_base = OTHER; note = 2'-O-methylguanosine-3'-phosphate
  modified_base 6: mod_base = OTHER; note = 2'-deoxy-2'-fluorocytidine-3'-phosphate
  modified_base 7: mod_base = OTHER; note = 2'-O-methyluridine-3'-phosphate
  modified_base 8: mod_base = OTHER; note = 2'-deoxy-2'-fluorocytidine-3'-phosphate
  modified_base 9: mod_base = OTHER; note = 2'-deoxy-2'-fluoroguanosine-3'-phosphate
  modified_base 10: mod_base = OTHER; note = 2'-O-methyladenosine-3'-phosphate
  modified_base 11: mod_base = OTHER; note = 2'-O-methyladenosine-3'-phosphate
  modified_base 12: mod_base = OTHER; note = 2'-O-methyladenosine-3'-phosphate
  modified_base 13: mod_base = OTHER; note = 2'-O-methyluridine-3'-phosphate
  modified_base 14: mod_base = OTHER; note = 2'-deoxy-2'-fluorouridine-3'-phosphate
  modified_base 15: mod_base = OTHER; note = 2'-O-methylguanosine-3'-phosphate
  modified_base 16: mod_base = OTHER; note = 2'-deoxy-2'-fluoroadenosine-3'-phosphate
  modified_base 17: mod_base = OTHER; note = 2'-O-methyluridine-3'-phosphate
  modified_base 18: mod_base = OTHER; note = 2'-O-methylguanosine-3'-phosphate
  modified_base 19: mod_base = OTHER; note = 2'-O-methyladenosine-3'-phosphate
  modified_base 20: mod_base = OTHER; note = 2'-O-methyluridine-3'-phosphate
  modified_base 21: mod_base = OTHER; note = 2'-O-methylguanosine-3'-phosphorothioate
  modified_base 22: mod_base = OTHER; note = 2'-O-methylcytidine-3'-phosphorothioate
  modified_base 23: mod_base = OTHER; note = 2'-O-methylcytidine
ttctgctcgaaattgatgatgcc

SEQ ID NO: 735 - RNA, 23 nt, synthetic construct
  source 1..23: mol_type = other RNA
  modified_base 1: mod_base = OTHER; note = 2'-O-methyladenosine-3'-phosphorothioate
  modified_base 2: mod_base = OTHER; note = 2'-deoxy-2'-fluorouridine-3'-phosphorothioate
  modified_base 3: mod_base = OTHER; note = 2'-O-methyluridine-3'-phosphate
  modified_base 4: mod_base = OTHER; note = 2'-O-methylcytidine-3'-phosphate
  modified_base 5: mod_base = OTHER; note = 2'-O-methyluridine-3'-phosphate
  modified_base 6: mod_base = OTHER; note = 2'-deoxy-2'-fluoroguanosine-3'-phosphate
  modified_base 7: mod_base = OTHER; note = 2'-O-methylcytidine-3'-phosphate
  modified_base 8: mod_base = OTHER; note = 2'-deoxy-2'-fluorouridine-3'-phosphate
  modified_base 9: mod_base = OTHER; note = 2'-deoxy-2'-fluorocytidine-3'-phosphate
  modified_base 10: mod_base = OTHER; note = 2'-O-methylguanosine-3'-phosphate
  modified_base 11: mod_base = OTHER; note = 2'-O-methyladenosine-3'-phosphate
  modified_base 12: mod_base = OTHER; note = 2'-O-methyladenosine-3'-phosphate
  modified_base 13: mod_base = OTHER; note = 2'-O-methyladenosine-3'-phosphate
  modified_base 14: mod_base = OTHER; note = 2'-deoxy-2'-fluorouridine-3'-phosphate
  modified_base 15: mod_base = OTHER; note = 2'-O-methyluridine-3'-phosphate
  modified_base 16: mod_base = OTHER; note = 2'-deoxy-2'-fluoroguanosine-3'-phosphate
  modified_base 17: mod_base = OTHER; note = 2'-O-methyladenosine-3'-phosphate
  modified_base 18: mod_base = OTHER; note = 2'-O-methyluridine-3'-phosphate
  modified_base 19: mod_base = OTHER; note = 2'-O-methylguanosine-3'-phosphate
  modified_base 20: mod_base = OTHER; note = 2'-O-methyladenosine-3'-phosphate
  modified_base 21: mod_base = OTHER; note = 2'-O-methyluridine-3'-phosphorothioate
  modified_base 22: mod_base = OTHER; note = 2'-O-methylguanosine-3'-phosphorothioate
  modified_base 23: mod_base = OTHER; note = 2'-O-methylcytidine
attctgctcgaaattgatgatgc

SEQ ID NO: 736 - RNA, 23 nt, synthetic construct
  source 1..23: mol_type = other RNA
  modified_base 1: mod_base = OTHER; note = 2'-O-methyladenosine-3'-phosphorothioate
  modified_base 2: mod_base = OTHER; note = 2'-deoxy-2'-fluorocytidine-3'-phosphorothioate
  modified_base 3: mod_base = OTHER; note = 2'-O-methyluridine-3'-phosphate
  modified_base 4: mod_base = OTHER; note = 2'-O-methyluridine-3'-phosphate
  modified_base 5: mod_base = OTHER; note = 2'-O-methylcytidine-3'-phosphate
  modified_base 6: mod_base = OTHER; note = 2'-deoxy-2'-fluorouridine-3'-phosphate
  modified_base 7: mod_base = OTHER; note = 2'-O-methylguanosine-3'-phosphate
  modified_base 8: mod_base = OTHER; note = 2'-deoxy-2'-fluorocytidine-3'-phosphate
  modified_base 9: mod_base = OTHER; note = 2'-deoxy-2'-fluorouridine-3'-phosphate
  modified_base 10: mod_base = OTHER; note = 2'-O-methylcytidine-3'-phosphate
  modified_base 11: mod_base = OTHER; note = 2'-O-methylguanosine-3'-phosphate
  modified_base 12: mod_base = OTHER; note = 2'-O-methyladenosine-3'-phosphate
  modified_base 13: mod_base = OTHER; note = 2'-O-methyladenosine-3'-phosphate
  modified_base 14: mod_base = OTHER; note = 2'-deoxy-2'-fluoroadenosine-3'-phosphate
  modified_base 15: mod_base = OTHER; note = 2'-O-methyluridine-3'-phosphate
  modified_base 16: mod_base = OTHER; note = 2'-deoxy-2'-fluorouridine-3'-phosphate
  modified_base 17: mod_base = OTHER; note = 2'-O-methylguanosine-3'-phosphate
  modified_base 18: mod_base = OTHER; note = 2'-O-methyladenosine-3'-phosphate
  modified_base 19: mod_base = OTHER; note = 2'-O-methyluridine-3'-phosphate
  modified_base 20: mod_base = OTHER; note = 2'-O-methylguanosine-3'-phosphate
  modified_base 21: mod_base = OTHER; note = 2'-O-methyladenosine-3'-phosphorothioate
  modified_base 22: mod_base = OTHER; note = 2'-O-methyluridine-3'-phosphorothioate
  modified_base 23: mod_base = OTHER; note = 2'-O-methylguanosine
acttctgctcgaaattgatgatg

SEQ ID NO: 737 - RNA, 23 nt, synthetic construct
  source 1..23: mol_type = other RNA
  modified_base 1: mod_base = OTHER; note = 2'-O-methyladenosine-3'-phosphorothioate
  modified_base 2: mod_base = OTHER; note = 2'-deoxy-2'-fluorocytidine-3'-phosphorothioate
  modified_base 3: mod_base = OTHER; note = 2'-O-methylcytidine-3'-phosphate
  modified_base 4: mod_base = OTHER; note = 2'-O-methyluridine-3'-phosphate
  modified_base 5: mod_base = OTHER; note = 2'-O-methyluridine-3'-phosphate
  modified_base 6: mod_base = OTHER; note = 2'-deoxy-2'-fluorocytidine-3'-phosphate
  modified_base 7: mod_base = OTHER; note = 2'-O-methyladenosine-3'-phosphate
  modified_base 8: mod_base = OTHER; note = 2'-deoxy-2'-fluoroguanosine-3'-phosphate
  modified_base 9: mod_base = OTHER; note = 2'-deoxy-2'-fluorouridine-3'-phosphate
  modified_base 10: mod_base = OTHER; note = 2'-O-methylcytidine-3'-phosphate
  modified_base 11: mod_base = OTHER; note = 2'-O-methyladenosine-3'-phosphate
  modified_base 12: mod_base = OTHER; note = 2'-O-methylguanosine-3'-phosphate
  modified_base 13: mod_base = OTHER; note = 2'-O-methyluridine-3'-phosphate
  modified_base 14: mod_base = OTHER; note = 2'-deoxy-2'-fluorocytidine-3'-phosphate
  modified_base 15: mod_base = OTHER; note = 2'-O-methylcytidine-3'-phosphate
  modified_base 16: mod_base = OTHER; note = 2'-deoxy-2'-fluorouridine-3'-phosphate
  modified_base 17: mod_base = OTHER; note = 2'-O-methyluridine-3'-phosphate
  modified_base 18: mod_base = OTHER; note = 2'-O-methyluridine-3'-phosphate
  modified_base 19: mod_base = OTHER; note = 2'-O-methyladenosine-3'-phosphate
  modified_base 20: mod_base = OTHER; note = 2'-O-methyladenosine-3'-phosphate
  modified_base 21: mod_base = OTHER; note = 2'-O-methyluridine-3'-phosphorothioate
  modified_base 22: mod_base = OTHER; note = 2'-O-methylguanosine-3'-phosphorothioate
  modified_base 23: mod_base = OTHER; note = 2'-O-methylcytidine
accttcagtcagtcctttaatgc

SEQ ID NO: 738 - RNA, 23 nt, synthetic construct
  source 1..23: mol_type = other RNA
  modified_base 1: mod_base = OTHER; note = 2'-O-methyladenosine-3'-phosphorothioate
  modified_base 2: mod_base = OTHER; note = 2'-deoxy-2'-fluorouridine-3'-phosphorothioate
  modified_base 3: mod_base = OTHER; note = 2'-O-methylcytidine-3'-phosphate
  modified_base 4: mod_base = OTHER; note = 2'-O-methyluridine-3'-phosphate
  modified_base 5: mod_base = OTHER; note = 2'-O-methylcytidine-3'-phosphate
  modified_base 6: mod_base = OTHER; note = 2'-deoxy-2'-fluorocytidine-3'-phosphate
  modified_base 7: mod_base = OTHER; note = 2'-O-methyladenosine-3'-phosphate
  modified_base 8: mod_base = OTHER; note = 2'-deoxy-2'-fluoroadenosine-3'-phosphate
  modified_base 9: mod_base = OTHER; note = 2'-deoxy-2'-fluoroadenosine-3'-phosphate
  modified_base 10: mod_base = OTHER; note = 2'-O-methylcytidine-3'-phosphate
  modified_base 11: mod_base = OTHER; note = 2'-O-methyluridine-3'-phosphate
  modified_base 12: mod_base = OTHER; note = 2'-O-methylcytidine-3'-phosphate
  modified_base 13: mod_base = OTHER; note = 2'-O-methyladenosine-3'-phosphate
  modified_base 14: mod_base = OTHER; note = 2'-deoxy-2'-fluorouridine-3'-phosphate
  modified_base 15: mod_base = OTHER; note = 2'-O-methylguanosine-3'-phosphate
  modified_base 16: mod_base = OTHER; note = 2'-deoxy-2'-fluoroadenosine-3'-phosphate
  modified_base 17: mod_base = OTHER; note = 2'-O-methyladenosine-3'-phosphate
  modified_base 18: mod_base = OTHER; note = 2'-O-methylcytidine-3'-phosphate
  modified_base 19: mod_base = OTHER; note = 2'-O-methyladenosine-3'-phosphate
  modified_base 20: mod_base = OTHER; note = 2'-O-methyluridine-3'-phosphate
  modified_base 21: mod_base = OTHER; note = 2'-O-methylguanosine-3'-phosphorothioate
  modified_base 22: mod_base = OTHER; note = 2'-O-methylguanosine-3'-phosphorothioate
  modified_base 23: mod_base = OTHER; note = 2'-O-methyladenosine
atctccaaactcatgaacatgga

SEQ ID NO: 739 - RNA, 23 nt, synthetic construct
  source 1..23: mol_type = other RNA
  modified_base 1: mod_base = OTHER; note = 2'-O-methyladenosine-3'-phosphorothioate
  modified_base 2: mod_base = OTHER; note = 2'-deoxy-2'-fluorouridine-3'-phosphorothioate
  modified_base 3: mod_base = OTHER; note = 2'-O-methyluridine-3'-phosphate
  modified_base 4: mod_base = OTHER; note = 2'-O-methyladenosine-3'-phosphate
  modified_base 5: mod_base = OTHER; note = 2'-O-methyluridine-3'-phosphate
  modified_base 6: mod_base = OTHER; note = 2'-deoxy-2'-fluorocytidine-3'-phosphate
  modified_base 7: mod_base = OTHER; note = 2'-O-methyluridine-3'-phosphate
  modified_base 8: mod_base = OTHER; note = 2'-deoxy-2'-fluorocytidine-3'-phosphate
  modified_base 9: mod_base = OTHER; note = 2'-deoxy-2'-fluorocytidine-3'-phosphate
  modified_base 10: mod_base = OTHER; note = 2'-O-methyladenosine-3'-phosphate
  modified_base 11: mod_base = OTHER; note = 2'-O-methyladenosine-3'-phosphate
  modified_base 12: mod_base = OTHER; note = 2'-O-methyladenosine-3'-phosphate
  modified_base 13: mod_base = OTHER; note = 2'-O-methylcytidine-3'-phosphate
  modified_base 14: mod_base = OTHER; note = 2'-deoxy-2'-fluorouridine-3'-phosphate
  modified_base 15: mod_base = OTHER; note = 2'-O-methylcytidine-3'-phosphate
  modified_base 16: mod_base = OTHER; note = 2'-deoxy-2'-fluoroadenosine-3'-phosphate
  modified_base 17: mod_base = OTHER; note = 2'-O-methyluridine-3'-phosphate
  modified_base 18: mod_base = OTHER; note = 2'-O-methylguanosine-3'-phosphate
  modified_base 19: mod_base = OTHER; note = 2'-O-methyladenosine-3'-phosphate
  modified_base 20: mod_base = OTHER; note = 2'-O-methyladenosine-3'-phosphate
  modified_base 21: mod_base = OTHER; note = 2'-O-methylcytidine-3'-phosphorothioate
  modified_base 22: mod_base = OTHER; note = 2'-O-methyladenosine-3'-phosphorothioate
  modified_base 23: mod_base = OTHER; note = 2'-O-methyluridine
attatctccaaactcatgaacat

SEQ ID NO: 740 - RNA, 23 nt, synthetic construct
  source 1..23: mol_type = other RNA
  modified_base 1: mod_base = OTHER; note = 2'-O-methyluridine-3'-phosphorothioate
  modified_base 2: mod_base = OTHER; note = 2'-deoxy-2'-fluoroadenosine-3'-phosphorothioate
  modified_base 3: mod_base = OTHER; note = 2'-O-methyluridine-3'-phosphate
  modified_base 4: mod_base = OTHER; note = 2'-O-methyluridine-3'-phosphate
  modified_base 5: mod_base = OTHER; note = 2'-O-methyladenosine-3'-phosphate
  modified_base 6: mod_base = OTHER; note = 2'-deoxy-2'-fluorouridine-3'-phosphate
  modified_base 7: mod_base = OTHER; note = 2'-O-methylcytidine-3'-phosphate
  modified_base 8: mod_base = OTHER; note = 2'-deoxy-2'-fluorouridine-3'-phosphate
  modified_base 9: mod_base = OTHER; note = 2'-deoxy-2'-fluorocytidine-3'-phosphate
  modified_base 10: mod_base = OTHER; note = 2'-O-methylcytidine-3'-phosphate
  modified_base 11: mod_base = OTHER; note = 2'-O-methyladenosine-3'-phosphate
  modified_base 12: mod_base = OTHER; note = 2'-O-methyladenosine-3'-phosphate
  modified_base 13: mod_base = OTHER; note = 2'-O-methyladenosine-3'-phosphate
  modified_base 14: mod_base = OTHER; note = 2'-deoxy-2'-fluorocytidine-3'-phosphate
  modified_base 15: mod_base = OTHER; note = 2'-O-methyluridine-3'-phosphate
  modified_base 16: mod_base = OTHER; note = 2'-deoxy-2'-fluorocytidine-3'-phosphate
  modified_base 17: mod_base = OTHER; note = 2'-O-methyladenosine-3'-phosphate
  modified_base 18: mod_base = OTHER; note = 2'-O-methyluridine-3'-phosphate
  modified_base 19: mod_base = OTHER; note = 2'-O-methylguanosine-3'-phosphate
  modified_base 20: mod_base = OTHER; note = 2'-O-methyladenosine-3'-phosphate
  modified_base 21: mod_base = OTHER; note = 2'-O-methyladenosine-3'-phosphorothioate
  modified_base 22: mod_base = OTHER; note = 2'-O-methylcytidine-3'-phosphorothioate
  modified_base 23: mod_base = OTHER; note = 2'-O-methyladenosine
tattatctccaaactcatgaaca

SEQ ID NO: 741 - RNA, 23 nt, synthetic construct
  source 1..23: mol_type = other RNA
  modified_base 1: mod_base = OTHER; note = 2'-O-methyladenosine-3'-phosphorothioate
  modified_base 2: mod_base = OTHER; note = 2'-deoxy-2'-fluorouridine-3'-phosphorothioate
  modified_base 3: mod_base = OTHER; note = 2'-O-methylguanosine-3'-phosphate
  modified_base 4: mod_base = OTHER; note = 2'-O-methyluridine-3'-phosphate
  modified_base 5: mod_base = OTHER; note = 2'-O-methyladenosine-3'-phosphate
  modified_base 6: mod_base = OTHER; note = 2'-deoxy-2'-fluorouridine-3'-phosphate
  modified_base 7: mod_base = OTHER; note = 2'-O-methyluridine-3'-phosphate
  modified_base 8: mod_base = OTHER; note = 2'-deoxy-2'-fluoroadenosine-3'-phosphate
  modified_base 9: mod_base = OTHER; note = 2'-deoxy-2'-fluorouridine-3'-phosphate
  modified_base 10: mod_base = OTHER; note = 2'-O-methylcytidine-3'-phosphate
  modified_base 11: mod_base = OTHER; note = 2'-O-methyluridine-3'-phosphate
  modified_base 12: mod_base = OTHER; note = 2'-O-methylcytidine-3'-phosphate
  modified_base 13: mod_base = OTHER; note = 2'-O-methylcytidine-3'-phosphate
  modified_base 14: mod_base = OTHER; note = 2'-deoxy-2'-fluoroadenosine-3'-phosphate
  modified_base 15: mod_base = OTHER; note = 2'-O-methyladenosine-3'-phosphate
  modified_base 16: mod_base = OTHER; note = 2'-deoxy-2'-fluoroadenosine-3'-phosphate
  modified_base 17: mod_base = OTHER; note = 2'-O-methylcytidine-3'-phosphate
  modified_base 18: mod_base = OTHER; note = 2'-O-methyluridine-3'-phosphate
  modified_base 19: mod_base = OTHER; note = 2'-O-methylcytidine-3'-phosphate
  modified_base 20: mod_base = OTHER; note = 2'-O-methyladenosine-3'-phosphate
  modified_base 21: mod_base = OTHER; note = 2'-O-methyluridine-3'-phosphorothioate
  modified_base 22: mod_base = OTHER; note = 2'-O-methylguanosine-3'-phosphorothioate
  modified_base 23: mod_base = OTHER; note = 2'-O-methyladenosine
atgtattatctccaaactcatga

SEQ ID NO: 742 - RNA, 23 nt, synthetic construct
  source 1..23: mol_type = other RNA
  modified_base 1: mod_base = OTHER; note = 2'-O-methyladenosine-3'-phosphorothioate
  modified_base 2: mod_base = OTHER; note = 2'-deoxy-2'-fluorocytidine-3'-phosphorothioate
  modified_base 3: mod_base = OTHER; note = 2'-O-methyladenosine-3'-phosphate
  modified_base 4: mod_base = OTHER; note = 2'-O-methylguanosine-3'-phosphate
  modified_base 5: mod_base = OTHER; note = 2'-O-methyladenosine-3'-phosphate
  modified_base 6: mod_base = OTHER; note = 2'-deoxy-2'-fluoroadenosine-3'-phosphate
  modified_base 7: mod_base = OTHER; note = 2'-O-methyluridine-3'-phosphate
  modified_base 8: mod_base = OTHER; note = 2'-deoxy-2'-fluorocytidine-3'-phosphate
  modified_base 9: mod_base = OTHER; note = 2'-deoxy-2'-fluorouridine-3'-phosphate
  modified_base 10: mod_base = OTHER; note = 2'-O-methyluridine-3'-phosphate
  modified_base 11: mod_base = OTHER; note = 2'-O-methylcytidine-3'-phosphate
  modified_base 12: mod_base = OTHER; note = 2'-O-methyladenosine-3'-phosphate
  modified_base 13: mod_base = OTHER; note = 2'-O-methyladenosine-3'-phosphate
  modified_base 14: mod_base = OTHER; note = 2'-deoxy-2'-fluorouridine-3'-phosphate
  modified_base 15: mod_base = OTHER; note = 2'-O-methyladenosine-3'-phosphate
  modified_base 16: mod_base = OTHER; note = 2'-deoxy-2'-fluoroguanosine-3'-phosphate
  modified_base 17: mod_base = OTHER; note = 2'-O-methyladenosine-3'-phosphate
  modified_base 18: mod_base = OTHER; note = 2'-O-methylcytidine-3'-phosphate
  modified_base 19: mod_base = OTHER; note = 2'-O-methyladenosine-3'-phosphate
  modified_base 20: mod_base = OTHER; note = 2'-O-methylcytidine-3'-phosphate
  modified_base 21: mod_base = OTHER; note = 2'-O-methyladenosine-3'-phosphorothioate
  modified_base 22: mod_base = OTHER; note = 2'-O-methyluridine-3'-phosphorothioate
  modified_base 23: mod_base = OTHER; note = 2'-O-methylcytidine
acagaatcttcaatagacacatc

SEQ ID NO: 743 - RNA, 23 nt, synthetic construct
  source 1..23: mol_type = other RNA
  modified_base 1: mod_base = OTHER; note = 2'-O-methyladenosine-3'-phosphorothioate
  modified_base 2: mod_base = OTHER; note = 2'-deoxy-2'-fluoroadenosine-3'-phosphorothioate
  modified_base 3: mod_base = OTHER; note = 2'-O-methylcytidine-3'-phosphate
  modified_base 4: mod_base = OTHER; note = 2'-O-methyladenosine-3'-phosphate
  modified_base 5: mod_base = OTHER; note = 2'-O-methylguanosine-3'-phosphate
  modified_base 6: mod_base = OTHER; note = 2'-deoxy-2'-fluoroadenosine-3'-phosphate
  modified_base 7: mod_base = OTHER; note = 2'-O-methyladenosine-3'-phosphate
  modified_base 8: mod_base = OTHER; note = 2'-deoxy-2'-fluorouridine-3'-phosphate
  modified_base 9: mod_base = OTHER; note = 2'-deoxy-2'-fluorocytidine-3'-phosphate
  modified_base 10: mod_base = OTHER; note = 2'-O-methyluridine-3'-phosphate
  modified_base 11: mod_base = OTHER; note = 2'-O-methyluridine-3'-phosphate
  modified_base 12: mod_base = OTHER; note = 2'-O-methylcytidine-3'-phosphate
  modified_base 13: mod_base = OTHER; note = 2'-O-methyladenosine-3'-phosphate
  modified_base 14: mod_base = OTHER; note = 2'-deoxy-2'-fluoroadenosine-3'-phosphate
  modified_base 15: mod_base = OTHER; note = 2'-O-methyluridine-3'-phosphate
  modified_base 16: mod_base = OTHER; note = 2'-deoxy-2'-fluoroadenosine-3'-phosphate
  modified_base 17: mod_base = OTHER; note = 2'-O-methylguanosine-3'-phosphate
  modified_base 18: mod_base = OTHER; note = 2'-O-methyladenosine-3'-phosphate
  modified_base 19: mod_base = OTHER; note = 2'-O-methylcytidine-3'-phosphate
  modified_base 20: mod_base = OTHER; note = 2'-O-methyladenosine-3'-phosphate
  modified_base 21: mod_base = OTHER; note = 2'-O-methylcytidine-3'-phosphorothioate
  modified_base 22: mod_base = OTHER; note = 2'-O-methyladenosine-3'-phosphorothioate
  modified_base 23: mod_base = OTHER; note = 2'-O-methyluridine
aacagaatcttcaatagacacat

SEQ ID NO: 744 - RNA, 23 nt, synthetic construct
  source 1..23: mol_type = other RNA
  modified_base 1: mod_base = OTHER; note = 2'-O-methyladenosine-3'-phosphorothioate
  modified_base 2: mod_base = OTHER; note = 2'-deoxy-2'-fluorouridine-3'-phosphorothioate
  modified_base 3: mod_base = OTHER; note = 2'-O-methylguanosine-3'-phosphate
  modified_base 4: mod_base = OTHER; note = 2'-O-methylcytidine-3'-phosphate
  modified_base 5: mod_base = OTHER; note = 2'-O-methyluridine-3'-phosphate
  modified_base 6: mod_base = OTHER; note = 2'-deoxy-2'-fluorouridine-3'-phosphate
  modified_base 7: mod_base = OTHER; note = 2'-O-methyluridine-3'-phosphate
  modified_base 8: mod_base = OTHER; note = 2'-deoxy-2'-fluorouridine-3'-phosphate
  modified_base 9: mod_base = OTHER; note = 2'-deoxy-2'-fluorouridine-3'-phosphate
  modified_base 10: mod_base = OTHER; note = 2'-O-methylcytidine-3'-phosphate
  modified_base 11: mod_base = OTHER; note = 2'-O-methyladenosine-3'-phosphate
  modified_base 12: mod_base = OTHER; note = 2'-O-methyluridine-3'-phosphate
  modified_base 13: mod_base = OTHER; note = 2'-O-methylguanosine-3'-phosphate
  modified_base 14: mod_base = OTHER; note = 2'-deoxy-2'-fluoroguanosine-3'-phosphate
  modified_base 15: mod_base = OTHER; note = 2'-O-methyladenosine-3'-phosphate
  modified_base 16: mod_base = OTHER; note = 2'-deoxy-2'-fluorocytidine-3'-phosphate
  modified_base 17: mod_base = OTHER; note = 2'-O-methylcytidine-3'-phosphate
  modified_base 18: mod_base = OTHER; note = 2'-O-methyladenosine-3'-phosphate
  modified_base 19: mod_base = OTHER; note = 2'-O-methylcytidine-3'-phosphate
  modified_base 20: mod_base = OTHER; note = 2'-O-methylcytidine-3'-phosphate
  modified_base 21: mod_base = OTHER; note = 2'-O-methyladenosine-3'-phosphorothioate
  modified_base 22: mod_base = OTHER; note = 2'-O-methylguanosine-3'-phosphorothioate
  modified_base 23: mod_base = OTHER; note = 2'-O-methyluridine
atgctttttcatggaccaccagt

SEQ ID NO: 745 - RNA, 23 nt, synthetic construct
  source 1..23: mol_type = other RNA
  modified_base 1: mod_base = OTHER; note = 2'-O-methyluridine-3'-phosphorothioate
  modified_base 2: mod_base = OTHER; note = 2'-deoxy-2'-fluorocytidine-3'-phosphorothioate
  modified_base 3: mod_base = OTHER; note = 2'-O-methyluridine-3'-phosphate
  modified_base 4: mod_base = OTHER; note = 2'-O-methylguanosine-3'-phosphate
  modified_base 5: mod_base = OTHER; note = 2'-O-methylcytidine-3'-phosphate
  modified_base 6: mod_base = OTHER; note = 2'-deoxy-2'-fluorouridine-3'-phosphate
  modified_base 7: mod_base = OTHER; note = 2'-O-methyluridine-3'-phosphate
  modified_base 8: mod_base = OTHER; note = 2'-deoxy-2'-fluorouridine-3'-phosphate
  modified_base 9: mod_base = OTHER; note = 2'-deoxy-2'-fluorouridine-3'-phosphate
  modified_base 10: mod_base = OTHER; note = 2'-O-methyluridine-3'-phosphate
  modified_base 11: mod_base = OTHER; note = 2'-O-methylcytidine-3'-phosphate
  modified_base 12: mod_base = OTHER; note = 2'-O-methyladenosine-3'-phosphate
  modified_base 13: mod_base = OTHER; note = 2'-O-methyluridine-3'-phosphate
  modified_base 14: mod_base = OTHER; note = 2'-deoxy-2'-fluoroguanosine-3'-phosphate
  modified_base 15: mod_base = OTHER; note = 2'-O-methylguanosine-3'-phosphate
  modified_base 16: mod_base = OTHER; note = 2'-deoxy-2'-fluoroadenosine-3'-phosphate
  modified_base 17: mod_base = OTHER; note = 2'-O-methylcytidine-3'-phosphate
  modified_base 18: mod_base = OTHER; note = 2'-O-methylcytidine-3'-phosphate
  modified_base 19: mod_base = OTHER; note = 2'-O-methyladenosine-3'-phosphate
  modified_base 20: mod_base = OTHER; note = 2'-O-methylcytidine-3'-phosphate
  modified_base 21: mod_base = OTHER; note = 2'-O-methylcytidine-3'-phosphorothioate
  modified_base 22: mod_base = OTHER; note = 2'-O-methyladenosine-3'-phosphorothioate
  modified_base 23: mod_base = OTHER; note = 2'-O-methylguanosine
tctgctttttcatggaccaccag

SEQ ID NO: 746 - RNA, 23 nt, synthetic construct
  source 1..23: mol_type = other RNA
  modified_base 1: mod_base = OTHER; note = 2'-O-methyladenosine-3'-phosphorothioate
  modified_base 2: mod_base = OTHER; note = 2'-deoxy-2'-fluoroguanosine-3'-phosphorothioate
  modified_base 3: mod_base = OTHER; note = 2'-O-methylcytidine-3'-phosphate
  modified_base 4: mod_base = OTHER; note = 2'-O-methylcytidine-3'-phosphate
  modified_base 5: mod_base = OTHER; note = 2'-O-methyladenosine-3'-phosphate
  modified_base 6: mod_base = OTHER; note = 2'-deoxy-2'-fluoroadenosine-3'-phosphate
  modified_base 7: mod_base = OTHER; note = 2'-O-methyluridine-3'-phosphate
  modified_base 8: mod_base = OTHER; note = 2'-deoxy-2'-fluoroguanosine-3'-phosphate
  modified_base 9: mod_base = OTHER; note = 2'-deoxy-2'-fluoroadenosine-3'-phosphate
  modified_base 10: mod_base = OTHER; note = 2'-O-methyluridine-3'-phosphate
  modified_base 11: mod_base = OTHER; note = 2'-O-methylguanosine-3'-phosphate
  modified_base 12: mod_base = OTHER; note = 2'-O-methylcytidine-3'-phosphate
  modified_base 13: mod_base = OTHER; note = 2'-O-methyladenosine-3'-phosphate
  modified_base 14: mod_base = OTHER; note = 2'-deoxy-2'-fluoroadenosine-3'-phosphate
  modified_base 15: mod_base = OTHER; note = 2'-O-methyluridine-3'-phosphate
  modified_base 16: mod_base = OTHER; note = 2'-deoxy-2'-fluoroguanosine-3'-phosphate
  modified_base 17: mod_base = OTHER; note = 2'-O-methylguanosine-3'-phosphate
  modified_base 18: mod_base = OTHER; note = 2'-O-methyluridine-3'-phosphate
  modified_base 19: mod_base = OTHER; note = 2'-O-methylcytidine-3'-phosphate
  modified_base 20: mod_base = OTHER; note = 2'-O-methyluridine-3'-phosphate
  modified_base 21: mod_base = OTHER; note = 2'-O-methylcytidine-3'-phosphorothioate
  modified_base 22: mod_base = OTHER; note = 2'-O-methylcytidine-3'-phosphorothioate
  modified_base 23: mod_base = OTHER; note = 2'-O-methyluridine
agccaatgatgcaatggtctcct

SEQ ID NO: 747 - RNA, 23 nt, synthetic construct
  source 1..23: mol_type = other RNA
  modified_base 1: mod_base = OTHER; note = 2'-O-methyladenosine-3'-phosphorothioate
  modified_base 2: mod_base = OTHER; note = 2'-deoxy-2'-fluorocytidine-3'-phosphorothioate
  modified_base 3: mod_base = OTHER; note = 2'-O-methyluridine-3'-phosphate
  modified_base 4: mod_base = OTHER; note = 2'-O-methyluridine-3'-phosphate
  modified_base 5: mod_base = OTHER; note = 2'-O-methyluridine-3'-phosphate
  modified_base 6: mod_base = OTHER; note = 2'-deoxy-2'-fluorouridine-3'-phosphate
  modified_base 7: mod_base = OTHER; note = 2'-O-methyluridine-3'-phosphate
  modified_base 8: mod_base = OTHER; note = 2'-deoxy-2'-fluorocytidine-3'-phosphate
  modified_base 9: mod_base = OTHER; note = 2'-deoxy-2'-fluoroadenosine-3'-phosphate
  modified_base 10: mod_base = OTHER; note = 2'-O-methyluridine-3'-phosphate
  modified_base 11: mod_base = OTHER; note = 2'-O-methylguanosine-3'-phosphate
  modified_base 12: mod_base = OTHER; note = 2'-O-methylguanosine-3'-phosphate
  modified_base 13: mod_base = OTHER; note = 2'-O-methyladenosine-3'-phosphate
  modified_base 14: mod_base = OTHER; note = 2'-deoxy-2'-fluorocytidine-3'-phosphate
  modified_base 15: mod_base = OTHER; note = 2'-O-methylcytidine-3'-phosphate
  modified_base 16: mod_base = OTHER; note = 2'-deoxy-2'-fluoroadenosine-3'-phosphate
  modified_base 17: mod_base = OTHER; note = 2'-O-methylcytidine-3'-phosphate
  modified_base 18: mod_base = OTHER; note = 2'-O-methylcytidine-3'-phosphate
  modified_base 19: mod_base = OTHER; note = 2'-O-methyladenosine-3'-phosphate
  modified_base 20: mod_base = OTHER; note = 2'-O-methylguanosine-3'-phosphate
  modified_base 21: mod_base = OTHER; note = 2'-O-methyluridine-3'-phosphorothioate
  modified_base 22: mod_base = OTHER; note = 2'-O-methylguanosine-3'-phosphorothioate
  modified_base 23: mod_base = OTHER; note = 2'-O-methyluridine
actttttcatggaccaccagtgt

SEQ ID NO: 748 - RNA, 23 nt, synthetic construct
  source 1..23: mol_type = other RNA
  modified_base 1: mod_base = OTHER; note = 2'-O-methyluridine-3'-phosphorothioate
  modified_base 2: mod_base = OTHER; note = 2'-deoxy-2'-fluoroguanosine-3'-phosphorothioate
  modified_base 3: mod_base = OTHER; note = 2'-O-methylcytidine-3'-phosphate
  modified_base 4: mod_base = OTHER; note = 2'-O-methyluridine-3'-phosphate
  modified_base 5: mod_base = OTHER; note = 2'-O-methyluridine-3'-phosphate
  modified_base 6: mod_base = OTHER; note = 2'-deoxy-2'-fluorouridine-3'-phosphate
  modified_base 7: mod_base = OTHER; note = 2'-O-methyluridine-3'-phosphate
  modified_base 8: mod_base = OTHER; note = 2'-deoxy-2'-fluorouridine-3'-phosphate
  modified_base 9: mod_base = OTHER; note = 2'-deoxy-2'-fluorocytidine-3'-phosphate
  modified_base 10: mod_base = OTHER; note = 2'-O-methyladenosine-3'-phosphate
  modified_base 11: mod_base = OTHER; note = 2'-O-methyluridine-3'-phosphate
  modified_base 12: mod_base = OTHER; note = 2'-O-methylguanosine-3'-phosphate
  modified_base 13: mod_base = OTHER; note = 2'-O-methylguanosine-3'-phosphate
  modified_base 14: mod_base = OTHER; note = 2'-deoxy-2'-fluoroadenosine-3'-phosphate
  modified_base 15: mod_base = OTHER; note = 2'-O-methylcytidine-3'-phosphate
  modified_base 16: mod_base = OTHER; note = 2'-deoxy-2'-fluorocytidine-3'-phosphate
  modified_base 17: mod_base = OTHER; note = 2'-O-methyladenosine-3'-phosphate
  modified_base 18: mod_base = OTHER; note = 2'-O-methylcytidine-3'-phosphate
  modified_base 19: mod_base = OTHER; note = 2'-O-methylcytidine-3'-phosphate
  modified_base 20: mod_base = OTHER; note = 2'-O-methyladenosine-3'-phosphate
  modified_base 21: mod_base = OTHER; note = 2'-O-methylguanosine-3'-phosphorothioate
  modified_base 22: mod_base = OTHER; note = 2'-O-methyluridine-3'-phosphorothioate
  modified_base 23: mod_base = OTHER; note = 2'-O-methylguanosine
tgctttttcatggaccaccagtg

SEQ ID NO: 749 - RNA, 23 nt, synthetic construct
  source 1..23: mol_type = other RNA
  modified_base 1: mod_base = OTHER; note = 2'-O-methyladenosine-3'-phosphorothioate
  modified_base 2: mod_base = OTHER; note = 2'-deoxy-2'-fluorouridine-3'-phosphorothioate
  modified_base 3: mod_base = OTHER; note = 2'-O-methyladenosine-3'-phosphate
  modified_base 4: mod_base = OTHER; note = 2'-O-methylcytidine-3'-phosphate
  modified_base 5: mod_base = OTHER; note = 2'-O-methyluridine-3'-phosphate
  modified_base 6: mod_base = OTHER; note = 2'-deoxy-2'-fluorouridine-3'-phosphate
  modified_base 7: mod_base = OTHER; note = 2'-O-methyluridine-3'-phosphate
  modified_base 8: mod_base = OTHER; note = 2'-deoxy-2'-fluorocytidine-3'-phosphate
  modified_base 9: mod_base = OTHER; note = 2'-deoxy-2'-fluorouridine-3'-phosphate
  modified_base 10: mod_base = OTHER; note = 2'-O-methyluridine-3'-phosphate
  modified_base 11: mod_base = OTHER; note = 2'-O-methylcytidine-3'-phosphate
  modified_base 12: mod_base = OTHER; note = 2'-O-methyladenosine-3'-phosphate
  modified_base 13: mod_base = OTHER; note = 2'-O-methyluridine-3'-phosphate
  modified_base 14: mod_base = OTHER; note = 2'-deoxy-2'-fluorouridine-3'-phosphate
  modified_base 15: mod_base = OTHER; note = 2'-O-methyluridine-3'-phosphate
  modified_base 16: mod_base = OTHER; note = 2'-deoxy-2'-fluorocytidine-3'-phosphate
  modified_base 17: mod_base = OTHER; note = 2'-O-methylcytidine-3'-phosphate
  modified_base 18: mod_base = OTHER; note = 2'-O-methyladenosine-3'-phosphate
  modified_base 19: mod_base = OTHER; note = 2'-O-methylcytidine-3'-phosphate
  modified_base 20: mod_base = OTHER; note = 2'-O-methylcytidine-3'-phosphate
  modified_base 21: mod_base = OTHER; note = 2'-O-methyluridine-3'-phosphorothioate
  modified_base 22: mod_base = OTHER; note = 2'-O-methyluridine-3'-phosphorothioate
  modified_base 23: mod_base = OTHER; note = 2'-O-methyluridine
atactttcttcatttccaccttt

SEQ ID NO: 750 - RNA, 23 nt, synthetic construct
  source 1..23: mol_type = other RNA
  modified_base 1: mod_base = OTHER; note = 2'-O-methyladenosine-3'-phosphorothioate
  modified_base 2: mod_base = OTHER; note = 2'-deoxy-2'-fluorouridine-3'-phosphorothioate
  modified_base 3: mod_base = OTHER; note = 2'-O-methyluridine-3'-phosphate
  modified_base 4: mod_base = OTHER; note = 2'-O-methyluridine-3'-phosphate
  modified_base 5: mod_base = OTHER; note = 2'-O-methylcytidine-3'-phosphate
  modified_base 6: mod_base = OTHER; note = 2'-deoxy-2'-fluorocytidine-3'-phosphate
  modified_base 7: mod_base = OTHER; note = 2'-O-methyluridine-3'-phosphate
  modified_base 8: mod_base = OTHER; note = 2'-deoxy-2'-fluoroguanosine-3'-phosphate
  modified_base 9: mod_base = OTHER; note = 2'-deoxy-2'-fluorouridine-3'-phosphate
  modified_base 10: mod_base = OTHER; note = 2'-O-methylcytidine-3'-phosphate
  modified_base 11: mod_base = OTHER; note = 2'-O-methyluridine-3'-phosphate
  modified_base 12: mod_base = OTHER; note = 2'-O-methyluridine-3'-phosphate
  modified_base 13: mod_base = OTHER; note = 2'-O-methyluridine-3'-phosphate
  modified_base 14: mod_base = OTHER; note = 2'-deoxy-2'-fluoroguanosine-3'-phosphate
  modified_base 15: mod_base = OTHER; note = 2'-O-methyluridine-3'-phosphate
  modified_base 16: mod_base = OTHER; note = 2'-deoxy-2'-fluoroadenosine-3'-phosphate
  modified_base 17: mod_base = OTHER; note = 2'-O-methylcytidine-3'-phosphate
  modified_base 18: mod_base = OTHER; note = 2'-O-methyluridine-3'-phosphate
  modified_base 19: mod_base = OTHER; note = 2'-O-methyluridine-3'-phosphate
  modified_base 20: mod_base = OTHER; note = 2'-O-methyluridine-3'-phosphate
  modified_base 21: mod_base = OTHER; note = 2'-O-methylcytidine-3'-phosphorothioate
  modified_base 22: mod_base = OTHER; note = 2'-O-methyluridine-3'-phosphorothioate
  modified_base 23: mod_base = OTHER; note = 2'-O-methyluridine
atttcctgtctttgtactttctt

SEQ ID NO: 751 - RNA, 23 nt, synthetic construct
  source 1..23: mol_type = other RNA
  modified_base 1: mod_base = OTHER; note = 2'-O-methyladenosine-3'-phosphorothioate
  modified_base 2: mod_base = OTHER; note = 2'-deoxy-2'-fluoroguanosine-3'-phosphorothioate
  modified_base 3: mod_base = OTHER; note = 2'-O-methyluridine-3'-phosphate
  modified_base 4: mod_base = OTHER; note = 2'-O-methyluridine-3'-phosphate
  modified_base 5: mod_base = OTHER; note = 2'-O-methyluridine-3'-phosphate
  modified_base 6: mod_base = OTHER; note = 2'-deoxy-2'-fluorocytidine-3'-phosphate
  modified_base 7: mod_base = OTHER; note = 2'-O-methylcytidine-3'-phosphate
  modified_base 8: mod_base = OTHER; note = 2'-deoxy-2'-fluorouridine-3'-phosphate
  modified_base 9: mod_base = OTHER; note = 2'-deoxy-2'-fluoroguanosine-3'-phosphate
  modified_base 10: mod_base = OTHER; note = 2'-O-methyluridine-3'-phosphate
  modified_base 11: mod_base = OTHER; note = 2'-O-methylcytidine-3'-phosphate
  modified_base 12: mod_base = OTHER; note = 2'-O-methyluridine-3'-phosphate
  modified_base 13: mod_base = OTHER; note = 2'-O-methyluridine-3'-phosphate
  modified_base 14: mod_base = OTHER; note = 2'-deoxy-2'-fluorouridine-3'-phosphate
  modified_base 15: mod_base = OTHER; note = 2'-O-methylguanosine-3'-phosphate
  modified_base 16: mod_base = OTHER; note = 2'-deoxy-2'-fluorouridine-3'-phosphate
  modified_base 17: mod_base = OTHER; note = 2'-O-methyladenosine-3'-phosphate
  modified_base 18: mod_base = OTHER; note = 2'-O-methylcytidine-3'-phosphate
  modified_base 19: mod_base = OTHER; note = 2'-O-methyluridine-3'-phosphate
  modified_base 20: mod_base = OTHER; note = 2'-O-methyluridine-3'-phosphate
  modified_base 21: mod_base = OTHER; note = 2'-O-methyluridine-3'-phosphorothioate
  modified_base 22: mod_base = OTHER; note = 2'-O-methylcytidine-3'-phosphorothioate
  modified_base 23: mod_base = OTHER; note = 2'-O-methyluridine
agtttcctgtctttgtactttct

SEQ ID NO: 752 - RNA, 23 nt, synthetic construct
  source 1..23: mol_type = other RNA
  modified_base 1: mod_base = OTHER; note = 2'-O-methyladenosine-3'-phosphorothioate
  modified_base 2: mod_base = OTHER; note = 2'-deoxy-2'-fluorocytidine-3'-phosphorothioate
  modified_base 3: mod_base = OTHER; note = 2'-O-methylguanosine-3'-phosphate
  modified_base 4: mod_base = OTHER; note = 2'-O-methyluridine-3'-phosphate
  modified_base 5: mod_base = OTHER; note = 2'-O-methyluridine-3'-phosphate
  modified_base 6: mod_base = OTHER; note = 2'-deoxy-2'-fluorouridine-3'-phosphate
  modified_base 7: mod_base = OTHER; note = 2'-O-methylcytidine-3'-phosphate
  modified_base 8: mod_base = OTHER; note = 2'-deoxy-2'-fluorocytidine-3'-phosphate
  modified_base 9: mod_base = OTHER; note = 2'-deoxy-2'-fluorouridine-3'-phosphate
  modified_base 10: mod_base = OTHER; note = 2'-O-methylguanosine-3'-phosphate
  modified_base 11: mod_base = OTHER; note = 2'-O-methyluridine-3'-phosphate
  modified_base 12: mod_base = OTHER; note = 2'-O-methylcytidine-3'-phosphate
  modified_base 13: mod_base = OTHER; note = 2'-O-methyluridine-3'-phosphate
  modified_base 14: mod_base = OTHER; note = 2'-deoxy-2'-fluorouridine-3'-phosphate
  modified_base 15: mod_base = OTHER; note = 2'-O-methyluridine-3'-phosphate
  modified_base 16: mod_base = OTHER; note = 2'-deoxy-2'-fluoroguanosine-3'-phosphate
  modified_base 17: mod_base = OTHER; note = 2'-O-methyluridine-3'-phosphate
  modified_base 18: mod_base = OTHER; note = 2'-O-methyladenosine-3'-phosphate
  modified_base 19: mod_base = OTHER; note = 2'-O-methylcytidine-3'-phosphate
  modified_base 20: mod_base = OTHER; note = 2'-O-methyluridine-3'-phosphate
  modified_base 21: mod_base = OTHER; note = 2'-O-methyluridine-3'-phosphorothioate
  modified_base 22: mod_base = OTHER; note = 2'-O-methyluridine-3'-phosphorothioate
  modified_base 23: mod_base = OTHER; note = 2'-O-methylcytidine
acgtttcctgtctttgtactttc

SEQ ID NO: 753 - RNA, 23 nt, synthetic construct
  source 1..23: mol_type = other RNA
  modified_base 1: mod_base = OTHER; note = 2'-O-methyladenosine-3'-phosphorothioate
  modified_base 2: mod_base = OTHER; note = 2'-deoxy-2'-fluoroguanosine-3'-phosphorothioate
  modified_base 3: mod_base = OTHER; note = 2'-O-methylcytidine-3'-phosphate
  modified_base 4: mod_base = OTHER; note = 2'-O-methylguanosine-3'-phosphate
  modified_base 5: mod_base = OTHER; note = 2'-O-methyluridine-3'-phosphate
  modified_base 6: mod_base = OTHER; note = 2'-deoxy-2'-fluorouridine-3'-phosphate
  modified_base 7: mod_base = OTHER; note = 2'-O-methyluridine-3'-phosphate
  modified_base 8: mod_base = OTHER; note = 2'-deoxy-2'-fluorocytidine-3'-phosphate
  modified_base 9: mod_base = OTHER; note = 2'-deoxy-2'-fluorocytidine-3'-phosphate
  modified_base 10: mod_base = OTHER; note = 2'-O-methyluridine-3'-phosphate
  modified_base 11: mod_base = OTHER; note = 2'-O-methylguanosine-3'-phosphate
  modified_base 12: mod_base = OTHER; note = 2'-O-methyluridine-3'-phosphate
  modified_base 13: mod_base = OTHER; note = 2'-O-methylcytidine-3'-phosphate
  modified_base 14: mod_base = OTHER; note = 2'-deoxy-2'-fluorouridine-3'-phosphate
  modified_base 15: mod_base = OTHER; note = 2'-O-methyluridine-3'-phosphate
  modified_base 16: mod_base = OTHER; note = 2'-deoxy-2'-fluorouridine-3'-phosphate
  modified_base 17: mod_base = OTHER; note = 2'-O-methylguanosine-3'-phosphate
  modified_base 18: mod_base = OTHER; note = 2'-O-methyluridine-3'-phosphate
  modified_base 19: mod_base = OTHER; note = 2'-O-methyladenosine-3'-phosphate
  modified_base 20: mod_base = OTHER; note = 2'-O-methylcytidine-3'-phosphate
  modified_base 21: mod_base = OTHER; note = 2'-O-methyluridine-3'-phosphorothioate
  modified_base 22: mod_base = OTHER; note = 2'-O-methyluridine-3'-phosphorothioate
  modified_base 23: mod_base = OTHER; note = 2'-O-methyluridine
agcgtttcctgtctttgtacttt

SEQ ID NO: 754 - RNA, 23 nt, synthetic construct
  source 1..23: mol_type = other RNA
  modified_base 1: mod_base = OTHER; note = 2'-O-methyladenosine-3'-phosphorothioate
  modified_base 2: mod_base = OTHER; note = 2'-deoxy-2'-fluoroadenosine-3'-phosphorothioate
  modified_base 3: mod_base = OTHER; note = 2'-O-methylguanosine-3'-phosphate
  modified_base 4: mod_base = OTHER; note = 2'-O-methylcytidine-3'-phosphate
  modified_base 5: mod_base = OTHER; note = 2'-O-methylguanosine-3'-phosphate
  modified_base 6: mod_base = OTHER; note = 2'-deoxy-2'-fluorouridine-3'-phosphate
  modified_base 7: mod_base = OTHER; note = 2'-O-methyluridine-3'-phosphate
  modified_base 8: mod_base = OTHER; note = 2'-deoxy-2'-fluorouridine-3'-phosphate
  modified_base 9: mod_base = OTHER; note = 2'-deoxy-2'-fluorocytidine-3'-phosphate
  modified_base 10: mod_base = OTHER; note = 2'-O-methylcytidine-3'-phosphate
  modified_base 11: mod_base = OTHER; note = 2'-O-methyluridine-3'-phosphate
  modified_base 12: mod_base = OTHER; note = 2'-O-methylguanosine-3'-phosphate
  modified_base 13: mod_base = OTHER; note = 2'-O-methyluridine-3'-phosphate
  modified_base 14: mod_base = OTHER; note = 2'-deoxy-2'-fluorocytidine-3'-phosphate
  modified_base 15: mod_base = OTHER; note = 2'-O-methyluridine-3'-phosphate
  modified_base 16: mod_base = OTHER; note = 2'-deoxy-2'-fluorouridine-3'-phosphate
  modified_base 17: mod_base = OTHER; note = 2'-O-methyluridine-3'-phosphate
  modified_base 18: mod_base = OTHER; note = 2'-O-methylguanosine-3'-phosphate
  modified_base 19: mod_base = OTHER; note = 2'-O-methyluridine-3'-phosphate
  modified_base 20: mod_base = OTHER; note = 2'-O-methyladenosine-3'-phosphate
  modified_base 21: mod_base = OTHER; note = 2'-O-methylcytidine-3'-phosphorothioate
  modified_base 22: mod_base = OTHER; note = 2'-O-methyluridine-3'-phosphorothioate
  modified_base 23: mod_base = OTHER; note = 2'-O-methyluridine
aagcgtttcctgtctttgtactt

SEQ ID NO: 755 - RNA, 23 nt, synthetic construct
  source 1..23: mol_type = other RNA
  modified_base 1: mod_base = OTHER; note = 2'-O-methyladenosine-3'-phosphorothioate
  modified_base 2: mod_base = OTHER; note = 2'-deoxy-2'-fluorocytidine-3'-phosphorothioate
  modified_base 3: mod_base = OTHER; note = 2'-O-methyladenosine-3'-phosphate
  modified_base 4: mod_base = OTHER; note = 2'-O-methylguanosine-3'-phosphate
  modified_base 5: mod_base = OTHER; note = 2'-O-methylcytidine-3'-phosphate
  modified_base 6: mod_base = OTHER; note = 2'-deoxy-2'-fluoroguanosine-3'-phosphate
  modified_base 7: mod_base = OTHER; note = 2'-O-methyluridine-3'-phosphate
  modified_base 8: mod_base = OTHER; note = 2'-deoxy-2'-fluorouridine-3'-phosphate
  modified_base 9: mod_base = OTHER; note = 2'-deoxy-2'-fluorouridine-3'-phosphate
  modified_base 10: mod_base = OTHER; note = 2'-O-methylcytidine-3'-phosphate
  modified_base 11: mod_base = OTHER; note = 2'-O-methylcytidine-3'-phosphate
  modified_base 12: mod_base = OTHER; note = 2'-O-methyluridine-3'-phosphate
  modified_base 13: mod_base = OTHER; note = 2'-O-methylguanosine-3'-phosphate
  modified_base 14: mod_base = OTHER; note = 2'-deoxy-2'-fluorouridine-3'-phosphate
  modified_base 15: mod_base = OTHER; note = 2'-O-methylcytidine-3'-phosphate
  modified_base 16: mod_base = OTHER; note = 2'-deoxy-2'-fluorouridine-3'-phosphate
  modified_base 17: mod_base = OTHER; note = 2'-O-methyluridine-3'-phosphate
  modified_base 18: mod_base = OTHER; note = 2'-O-methyluridine-3'-phosphate
  modified_base 19: mod_base = OTHER; note = 2'-O-methylguanosine-3'-phosphate
  modified_base 20: mod_base = OTHER; note = 2'-O-methyluridine-3'-phosphate
  modified_base 21: mod_base = OTHER; note = 2'-O-methyladenosine-3'-phosphorothioate
  modified_base 22: mod_base = OTHER; note = 2'-O-methylcytidine-3'-phosphorothioate
  modified_base 23: mod_base = OTHER; note = 2'-O-methyluridine
acagcgtttcctgtctttgtact

SEQ ID NO: 756 - RNA, 23 nt, synthetic construct
  source 1..23: mol_type = other RNA
  modified_base 1: mod_base = OTHER; note = 2'-O-methyluridine-3'-phosphorothioate
  modified_base 2: mod_base = OTHER; note = 2'-deoxy-2'-fluorouridine-3'-phosphorothioate
  modified_base 3: mod_base = OTHER; note = 2'-O-methylcytidine-3'-phosphate
  modified_base 4: mod_base = OTHER; note = 2'-O-methylcytidine-3'-phosphate
  modified_base 5: mod_base = OTHER; note = 2'-O-methyladenosine-3'-phosphate
  modified_base 6: mod_base = OTHER; note = 2'-deoxy-2'-fluoroguanosine-3'-phosphate
  modified_base 7: mod_base = OTHER; note = 2'-O-methylcytidine-3'-phosphate
  modified_base 8: mod_base = OTHER; note = 2'-deoxy-2'-fluoroguanosine-3'-phosphate
  modified_base 9: mod_base = OTHER; note = 2'-deoxy-2'-fluorouridine-3'-phosphate
  modified_base 10: mod_base = OTHER; note = 2'-O-methyluridine-3'-phosphate
  modified_base 11: mod_base = OTHER; note = 2'-O-methyluridine-3'-phosphate
  modified_base 12: mod_base = OTHER; note = 2'-O-methylcytidine-3'-phosphate
  modified_base 13: mod_base = OTHER; note = 2'-O-methylcytidine-3'-phosphate
  modified_base 14: mod_base = OTHER; note = 2'-deoxy-2'-fluorouridine-3'-phosphate
  modified_base 15: mod_base = OTHER; note = 2'-O-methylguanosine-3'-phosphate
  modified_base 16: mod_base = OTHER; note = 2'-deoxy-2'-fluorouridine-3'-phosphate
  modified_base 17: mod_base = OTHER; note = 2'-O-methylcytidine-3'-phosphate
  modified_base 18: mod_base = OTHER; note = 2'-O-methyluridine-3'-phosphate
  modified_base 19: mod_base = OTHER; note = 2'-O-methyluridine-3'-phosphate
  modified_base 20: mod_base = OTHER; note = 2'-O-methyluridine-3'-phosphate
  modified_base 21: mod_base = OTHER; note = 2'-O-methylguanosine-3'-phosphorothioate
  modified_base 22: mod_base = OTHER; note = 2'-O-methyluridine-3'-phosphorothioate
  modified_base 23: mod_base = OTHER; note = 2'-O-methyladenosine
ttccagcgtttcctgtctttgta

SEQ ID NO: 757 - RNA, 23 nt, synthetic construct
  source 1..23: mol_type = other RNA
  modified_base 1: mod_base = OTHER; note = 2'-O-methyluridine-3'-phosphorothioate
  modified_base 2: mod_base = OTHER; note = 2'-deoxy-2'-fluorocytidine-3'-phosphorothioate
  modified_base 3: mod_base = OTHER; note = 2'-O-methylcytidine-3'-phosphate
  modified_base 4: mod_base = OTHER; note = 2'-O-methylcytidine-3'-phosphate
  modified_base 5: mod_base = OTHER; note = 2'-O-methyladenosine-3'-phosphate
  modified_base 6: mod_base = OTHER; note = 2'-deoxy-2'-fluoroadenosine-3'-phosphate
  modified_base 7: mod_base = OTHER; note = 2'-O-methyluridine-3'-phosphate
  modified_base 8: mod_base = OTHER; note = 2'-deoxy-2'-fluorouridine-3'-phosphate
  modified_base 9: mod_base = OTHER; note = 2'-deoxy-2'-fluoroadenosine-3'-phosphate
  modified_base 10: mod_base = OTHER; note = 2'-O-methylcytidine-3'-phosphate
  modified_base 11: mod_base = OTHER; note = 2'-O-methyladenosine-3'-phosphate
  modified_base 12: mod_base = OTHER; note = 2'-O-methylcytidine-3'-phosphate
  modified_base 13: mod_base = OTHER; note = 2'-O-methylcytidine-3'-phosphate
  modified_base 14: mod_base = OTHER; note = 2'-deoxy-2'-fluoroadenosine-3'-phosphate
  modified_base 15: mod_base = OTHER; note = 2'-O-methylcytidine-3'-phosphate
  modified_base 16: mod_base = OTHER; note = 2'-deoxy-2'-fluoroadenosine-3'-phosphate
  modified_base 17: mod_base = OTHER; note = 2'-O-methyladenosine-3'-phosphate
  modified_base 18: mod_base = OTHER; note = 2'-O-methylguanosine-3'-phosphate
  modified_base 19: mod_base = OTHER; note = 2'-O-methylcytidine-3'-phosphate
  modified_base 20: mod_base = OTHER; note = 2'-O-methylcytidine-3'-phosphate
  modified_base 21: mod_base = OTHER; note = 2'-O-methyladenosine-3'-phosphorothioate
  modified_base 22: mod_base = OTHER; note = 2'-O-methyladenosine-3'-phosphorothioate
  modified_base 23: mod_base = OTHER; note = 2'-O-methyladenosine
tcccaattacaccacaagccaaa

SEQ ID NO: 758 - RNA, 23 nt, synthetic construct
  source 1..23: mol_type = other RNA
  modified_base 1: mod_base = OTHER; note = 2'-O-methyladenosine-3'-phosphorothioate
  modified_base 2: mod_base = OTHER; note = 2'-deoxy-2'-fluorouridine-3'-phosphorothioate
  modified_base 3: mod_base = OTHER; note = 2'-O-methylcytidine-3'-phosphate
  modified_base 4: mod_base = OTHER; note = 2'-O-methylcytidine-3'-phosphate
  modified_base 5: mod_base = OTHER; note = 2'-O-methylcytidine-3'-phosphate
  modified_base 6: mod_base = OTHER; note = 2'-deoxy-2'-fluoroadenosine-3'-phosphate
  modified_base 7: mod_base = OTHER; note = 2'-O-methyladenosine-3'-phosphate
  modified_base 8: mod_base = OTHER; note = 2'-deoxy-2'-fluorouridine-3'-phosphate
  modified_base 9: mod_base = OTHER; note = 2'-deoxy-2'-fluorouridine-3'-phosphate
  modified_base 10: mod_base = OTHER; note = 2'-O-methyladenosine-3'-phosphate
  modified_base 11: mod_base = OTHER; note = 2'-O-methylcytidine-3'-phosphate
  modified_base 12: mod_base = OTHER; note = 2'-O-methyladenosine-3'-phosphate
  modified_base 13: mod_base = OTHER; note = 2'-O-methylcytidine-3'-phosphate
  modified_base 14: mod_base = OTHER; note = 2'-deoxy-2'-fluorocytidine-3'-phosphate
  modified_base 15: mod_base = OTHER; note = 2'-O-methyladenosine-3'-phosphate
  modified_base 16: mod_base = OTHER; note = 2'-deoxy-2'-fluorocytidine-3'-phosphate
  modified_base 17: mod_base = OTHER; note = 2'-O-methyladenosine-3'-phosphate
  modified_base 18: mod_base = OTHER; note = 2'-O-methyladenosine-3'-phosphate
  modified_base 19: mod_base = OTHER; note = 2'-O-methylguanosine-3'-phosphate
  modified_base 20: mod_base = OTHER; note = 2'-O-methylcytidine-3'-phosphate
  modified_base 21: mod_base = OTHER; note = 2'-O-methylcytidine-3'-phosphorothioate
  modified_base 22: mod_base = OTHER; note = 2'-O-methyladenosine-3'-phosphorothioate
  modified_base 23: mod_base = OTHER; note = 2'-O-methyladenosine
atcccaattacaccacaagccaa

SEQ ID NO: 759 - RNA, 23 nt, synthetic construct
  source 1..23: mol_type = other RNA
  modified_base 1: mod_base = OTHER; note = 2'-O-methyluridine-3'-phosphorothioate
  modified_base 2: mod_base = OTHER; note = 2'-deoxy-2'-fluorouridine-3'-phosphorothioate
  modified_base 3: mod_base = OTHER; note = 2'-O-methyladenosine-3'-phosphate
  modified_base 4: mod_base = OTHER; note = 2'-O-methylcytidine-3'-phosphate
  modified_base 5: mod_base = OTHER; note = 2'-O-methyladenosine-3'-phosphate
  modified_base 6: mod_base = OTHER; note = 2'-deoxy-2'-fluorocytidine-3'-phosphate
  modified_base 7: mod_base = OTHER; note = 2'-O-methylcytidine-3'-phosphate
  modified_base 8: mod_base = OTHER; note = 2'-deoxy-2'-fluoroadenosine-3'-phosphate
  modified_base 9: mod_base = OTHER; note = 2'-deoxy-2'-fluorocytidine-3'-phosphate
  modified_base 10: mod_base = OTHER; note = 2'-O-methyladenosine-3'-phosphate
  modified_base 11: mod_base = OTHER; note = 2'-O-methyladenosine-3'-phosphate
  modified_base 12: mod_base = OTHER; note = 2'-O-methylguanosine-3'-phosphate
  modified_base 13: mod_base = OTHER; note = 2'-O-methylcytidine-3'-phosphate
  modified_base 14: mod_base = OTHER; note = 2'-deoxy-2'-fluorocytidine-3'-phosphate
  modified_base 15: mod_base = OTHER; note = 2'-O-methyladenosine-3'-phosphate
  modified_base 16: mod_base = OTHER; note = 2'-deoxy-2'-fluoroadenosine-3'-phosphate
  modified_base 17: mod_base = OTHER; note = 2'-O-methyladenosine-3'-phosphate
  modified_base 18: mod_base = OTHER; note = 2'-O-methylcytidine-3'-phosphate
  modified_base 19: mod_base = OTHER; note = 2'-O-methylguanosine-3'-phosphate
  modified_base 20: mod_base = OTHER; note = 2'-O-methyladenosine-3'-phosphate
  modified_base 21: mod_base = OTHER; note = 2'-O-methylcytidine-3'-phosphorothioate
  modified_base 22: mod_base = OTHER; note = 2'-O-methyluridine-3'-phosphorothioate
  modified_base 23: mod_base = OTHER; note = 2'-O-methyluridine
ttacaccacaagccaaacgactt

SEQ ID NO: 760 - RNA, 23 nt, synthetic construct
  source 1..23: mol_type = other RNA
  modified_base 1: mod_base = OTHER; note = 2'-O-methyladenosine-3'-phosphorothioate
  modified_base 2: mod_base = OTHER; note = 2'-deoxy-2'-fluorouridine-3'-phosphorothioate
  modified_base 3: mod_base = OTHER; note = 2'-O-methyluridine-3'-phosphate
  modified_base 4: mod_base = OTHER; note = 2'-O-methyladenosine-3'-phosphate
  modified_base 5: mod_base = OTHER; note = 2'-O-methylcytidine-3'-phosphate
  modified_base 6: mod_base = OTHER; note = 2'-deoxy-2'-fluoroadenosine-3'-phosphate
  modified_base 7: mod_base = OTHER; note = 2'-O-methylcytidine-3'-phosphate
  modified_base 8: mod_base = OTHER; note = 2'-deoxy-2'-fluorocytidine-3'-phosphate
  modified_base 9: mod_base = OTHER; note = 2'-deoxy-2'-fluoroadenosine-3'-phosphate
  modified_base 10: mod_base = OTHER; note = 2'-O-methylcytidine-3'-phosphate
  modified_base 11: mod_base = OTHER; note = 2'-O-methyladenosine-3'-phosphate
  modified_base 12: mod_base = OTHER; note = 2'-O-methyladenosine-3'-phosphate
  modified_base 13: mod_base = OTHER; note = 2'-O-methylguanosine-3'-phosphate
  modified_base 14: mod_base = OTHER; note = 2'-deoxy-2'-fluorocytidine-3'-phosphate
  modified_base 15: mod_base = OTHER; note = 2'-O-methylcytidine-3'-phosphate
  modified_base 16: mod_base = OTHER; note = 2'-deoxy-2'-fluoroadenosine-3'-phosphate
  modified_base 17: mod_base = OTHER; note = 2'-O-methyladenosine-3'-phosphate
  modified_base 18: mod_base = OTHER; note = 2'-O-methyladenosine-3'-phosphate
  modified_base 19: mod_base = OTHER; note = 2'-O-methylcytidine-3'-phosphate
  modified_base 20: mod_base = OTHER; note = 2'-O-methylguanosine-3'-phosphate
  modified_base 21: mod_base = OTHER; note = 2'-O-methyladenosine-3'-phosphorothioate
  modified_base 22: mod_base = OTHER; note = 2'-O-methylcytidine-3'-phosphorothioate
  modified_base 23: mod_base = OTHER; note = 2'-O-methyluridine
attacaccacaagccaaacgact

SEQ ID NO: 761 - RNA, 23 nt, synthetic construct
  source 1..23: mol_type = other RNA
  modified_base 1: mod_base = OTHER; note = 2'-O-methyladenosine-3'-phosphorothioate
  modified_base 2: mod_base = OTHER; note = 2'-deoxy-2'-fluoroadenosine-3'-phosphorothioate
  modified_base 3: mod_base = OTHER; note = 2'-O-methyluridine-3'-phosphate
  modified_base 4: mod_base = OTHER; note = 2'-O-methyluridine-3'-phosphate
  modified_base 5: mod_base = OTHER; note = 2'-O-methyladenosine-3'-phosphate
  modified_base 6: mod_base = OTHER; note = 2'-deoxy-2'-fluorocytidine-3'-phosphate
  modified_base 7: mod_base = OTHER; note = 2'-O-methyladenosine-3'-phosphate
  modified_base 8: mod_base = OTHER; note = 2'-deoxy-2'-fluorocytidine-3'-phosphate
  modified_base 9: mod_base = OTHER; note = 2'-deoxy-2'-fluorocytidine-3'-phosphate
  modified_base 10: mod_base = OTHER; note = 2'-O-methyladenosine-3'-phosphate
  modified_base 11: mod_base = OTHER; note = 2'-O-methylcytidine-3'-phosphate
  modified_base 12: mod_base = OTHER; note = 2'-O-methyladenosine-3'-phosphate
  modified_base 13: mod_base = OTHER; note = 2'-O-methyladenosine-3'-phosphate
  modified_base 14: mod_base = OTHER; note = 2'-deoxy-2'-fluoroguanosine-3'-phosphate
  modified_base 15: mod_base = OTHER; note = 2'-O-methylcytidine-3'-phosphate
  modified_base 16: mod_base = OTHER; note = 2'-deoxy-2'-fluorocytidine-3'-phosphate
  modified_base 17: mod_base = OTHER; note = 2'-O-methyladenosine-3'-phosphate
  modified_base 18: mod_base = OTHER; note = 2'-O-methyladenosine-3'-phosphate
  modified_base 19: mod_base = OTHER; note = 2'-O-methyladenosine-3'-phosphate
  modified_base 20: mod_base = OTHER; note = 2'-O-methylcytidine-3'-phosphate
  modified_base 21: mod_base = OTHER; note = 2'-O-methylguanosine-3'-phosphorothioate
  modified_base 22: mod_base = OTHER; note = 2'-O-methyladenosine-3'-phosphorothioate
  modified_base 23: mod_base = OTHER; note = 2'-O-methylcytidine
aattacaccacaagccaaacgac

SEQ ID NO: 762 - RNA, 23 nt, synthetic construct
  source 1..23: mol_type = other RNA
  modified_base 1: mod_base = OTHER; note = 2'-O-methyladenosine-3'-phosphorothioate
  modified_base 2: mod_base = OTHER; note = 2'-deoxy-2'-fluoroadenosine-3'-phosphorothioate
  modified_base 3: mod_base = OTHER; note = 2'-O-methyladenosine-3'-phosphate
  modified_base 4: mod_base = OTHER; note = 2'-O-methyluridine-3'-phosphate
  modified_base 5: mod_base = OTHER; note = 2'-O-methyluridine-3'-phosphate
  modified_base 6: mod_base = OTHER; note = 2'-deoxy-2'-fluoroadenosine-3'-phosphate
  modified_base 7: mod_base = OTHER; note = 2'-O-methylcytidine-3'-phosphate
  modified_base 8: mod_base = OTHER; note = 2'-deoxy-2'-fluoroadenosine-3'-phosphate
  modified_base 9: mod_base = OTHER; note = 2'-deoxy-2'-fluorocytidine-3'-phosphate
  modified_base 10: mod_base = OTHER; note = 2'-O-methylcytidine-3'-phosphate
  modified_base 11: mod_base = OTHER; note = 2'-O-methyladenosine-3'-phosphate
  modified_base 12: mod_base = OTHER; note = 2'-O-methylcytidine-3'-phosphate
  modified_base 13: mod_base = OTHER; note = 2'-O-methyladenosine-3'-phosphate
  modified_base 14: mod_base = OTHER; note = 2'-deoxy-2'-fluoroadenosine-3'-phosphate
  modified_base 15: mod_base = OTHER; note = 2'-O-methylguanosine-3'-phosphate
  modified_base 16: mod_base = OTHER; note = 2'-deoxy-2'-fluorocytidine-3'-phosphate
  modified_base 17: mod_base = OTHER; note = 2'-O-methylcytidine-3'-phosphate
  modified_base 18: mod_base = OTHER; note = 2'-O-methyladenosine-3'-phosphate
  modified_base 19: mod_base = OTHER; note = 2'-O-methyladenosine-3'-phosphate
  modified_base 20: mod_base = OTHER; note = 2'-O-methyladenosine-3'-phosphate
  modified_base 21: mod_base = OTHER; note = 2'-O-methylcytidine-3'-phosphorothioate
  modified_base 22: mod_base = OTHER; note = 2'-O-methylguanosine-3'-phosphorothioate
  modified_base 23: mod_base = OTHER; note = 2'-O-methyladenosine
aaattacaccacaagccaaacga

SEQ ID NO: 763 - RNA, 23 nt, synthetic construct
  source 1..23: mol_type = other RNA
  modified_base 1: mod_base = OTHER; note = 2'-O-methyladenosine-3'-phosphorothioate
  modified_base 2: mod_base = OTHER; note = 2'-deoxy-2'-fluorocytidine-3'-phosphorothioate
  modified_base 3: mod_base = OTHER; note = 2'-O-methyladenosine-3'-phosphate
  modified_base 4: mod_base = OTHER; note = 2'-O-methyladenosine-3'-phosphate
  modified_base 5: mod_base = OTHER; note = 2'-O-methyluridine-3'-phosphate
  modified_base 6: mod_base = OTHER; note = 2'-deoxy-2'-fluorouridine-3'-phosphate
  modified_base 7: mod_base = OTHER; note = 2'-O-methyladenosine-3'-phosphate
  modified_base 8: mod_base = OTHER; note = 2'-deoxy-2'-fluorocytidine-3'-phosphate
  modified_base 9: mod_base = OTHER; note = 2'-deoxy-2'-fluoroadenosine-3'-phosphate
  modified_base 10: mod_base = OTHER; note = 2'-O-methylcytidine-3'-phosphate
  modified_base 11: mod_base = OTHER; note = 2'-O-methylcytidine-3'-phosphate
  modified_base 12: mod_base = OTHER; note = 2'-O-methyladenosine-3'-phosphate
  modified_base 13: mod_base = OTHER; note = 2'-O-methylcytidine-3'-phosphate
  modified_base 14: mod_base = OTHER; note = 2'-deoxy-2'-fluoroadenosine-3'-phosphate
  modified_base 15: mod_base = OTHER; note = 2'-O-methyladenosine-3'-phosphate
  modified_base 16: mod_base = OTHER; note = 2'-deoxy-2'-fluoroguanosine-3'-phosphate
  modified_base 17: mod_base = OTHER; note = 2'-O-methylcytidine-3'-phosphate
  modified_base 18: mod_base = OTHER; note = 2'-O-methylcytidine-3'-phosphate
  modified_base 19: mod_base = OTHER; note = 2'-O-methyladenosine-3'-phosphate
  modified_base 20: mod_base = OTHER; note = 2'-O-methyladenosine-3'-phosphate
  modified_base 21: mod_base = OTHER; note = 2'-O-methyladenosine-3'-phosphorothioate
  modified_base 22: mod_base = OTHER; note = 2'-O-methylcytidine-3'-phosphorothioate
  modified_base 23: mod_base = OTHER; note = 2'-O-methylguanosine
acaattacaccacaagccaaacg

SEQ ID NO: 764 - RNA, 23 nt, synthetic construct
  source 1..23: mol_type = other RNA
  modified_base 1: mod_base = OTHER; note = 2'-O-methyladenosine-3'-phosphorothioate
  modified_base 2: mod_base = OTHER; note = 2'-deoxy-2'-fluorocytidine-3'-phosphorothioate
  modified_base 3: mod_base = OTHER; note = 2'-O-methylcytidine-3'-phosphate
  modified_base 4: mod_base = OTHER; note = 2'-O-methyladenosine-3'-phosphate
  modified_base 5: mod_base = OTHER; note = 2'-O-methyladenosine-3'-phosphate
  modified_base 6: mod_base = OTHER; note = 2'-deoxy-2'-fluorouridine-3'-phosphate
  modified_base 7: mod_base = OTHER; note = 2'-O-methyluridine-3'-phosphate
  modified_base 8: mod_base = OTHER; note = 2'-deoxy-2'-fluoroadenosine-3'-phosphate
  modified_base 9: mod_base = OTHER; note = 2'-deoxy-2'-fluorocytidine-3'-phosphate
  modified_base 10: mod_base = OTHER; note = 2'-O-methyladenosine-3'-phosphate
  modified_base 11: mod_base = OTHER; note = 2'-O-methylcytidine-3'-phosphate
  modified_base 12: mod_base = OTHER; note = 2'-O-methylcytidine-3'-phosphate
  modified_base 13: mod_base = OTHER; note = 2'-O-methyladenosine-3'-phosphate
  modified_base 14: mod_base = OTHER; note = 2'-deoxy-2'-fluorocytidine-3'-phosphate
  modified_base 15: mod_base = OTHER; note = 2'-O-methyladenosine-3'-phosphate
  modified_base 16: mod_base = OTHER; note = 2'-deoxy-2'-fluoroadenosine-3'-phosphate
  modified_base 17: mod_base = OTHER; note = 2'-O-methylguanosine-3'-phosphate
  modified_base 18: mod_base = OTHER; note = 2'-O-methylcytidine-3'-phosphate
  modified_base 19: mod_base = OTHER; note = 2'-O-methylcytidine-3'-phosphate
  modified_base 20: mod_base = OTHER; note = 2'-O-methyladenosine-3'-phosphate
  modified_base 21: mod_base = OTHER; note = 2'-O-methyladenosine-3'-phosphorothioate
  modified_base 22: mod_base = OTHER; note = 2'-O-methyladenosine-3'-phosphorothioate
  modified_base 23: mod_base = OTHER; note = 2'-O-methylcytidine
accaattacaccacaagccaaac

SEQ ID NO: 765 - RNA, 23 nt, synthetic construct
  source 1..23: mol_type = other RNA
  modified_base 1: mod_base = OTHER; note = 2'-O-methyluridine-3'-phosphorothioate
  modified_base 2: mod_base = OTHER; note = 2'-deoxy-2'-fluorouridine-3'-phosphorothioate
  modified_base 3: mod_base = OTHER; note = 2'-O-methyladenosine-3'-phosphate
  modified_base 4: mod_base = OTHER; note = 2'-O-methyluridine-3'-phosphate
  modified_base 5: mod_base = OTHER; note = 2'-O-methyluridine-3'-phosphate
  modified_base 6: mod_base = OTHER; note = 2'-deoxy-2'-fluoroguanosine-3'-phosphate
  modified_base 7: mod_base = OTHER; note = 2'-O-methylguanosine-3'-phosphate
  modified_base 8: mod_base = OTHER; note = 2'-deoxy-2'-fluoroguanosine-3'-phosphate
  modified_base 9: mod_base = OTHER; note = 2'-deoxy-2'-fluorocytidine-3'-phosphate
  modified_base 10: mod_base = OTHER; note = 2'-O-methylguanosine-3'-phosphate
  modified_base 11: mod_base = OTHER; note = 2'-O-methyladenosine-3'-phosphate
  modified_base 12: mod_base = OTHER; note = 2'-O-methyluridine-3'-phosphate
  modified_base 13: mod_base = OTHER; note = 2'-O-methylcytidine-3'-phosphate
  modified_base 14: mod_base = OTHER; note = 2'-deoxy-2'-fluorocytidine-3'-phosphate
  modified_base 15: mod_base = OTHER; note = 2'-O-methylcytidine-3'-phosphate
  modified_base 16: mod_base = OTHER; note = 2'-deoxy-2'-fluoroadenosine-3'-phosphate
  modified_base 17: mod_base = OTHER; note = 2'-O-methyladenosine-3'-phosphate
  modified_base 18: mod_base = OTHER; note = 2'-O-methyluridine-3'-phosphate
  modified_base 19: mod_base = OTHER; note = 2'-O-methyluridine-3'-phosphate
  modified_base 20: mod_base = OTHER; note = 2'-O-methyladenosine-3'-phosphate
  modified_base 21: mod_base = OTHER; note = 2'-O-methylcytidine-3'-phosphorothioate
  modified_base 22: mod_base = OTHER; note = 2'-O-methyladenosine-3'-phosphorothioate
  modified_base 23: mod_base = OTHER; note = 2'-O-methylcytidine
ttattgggcgatcccaattacac

SEQ ID NO: 766 - RNA, 23 nt, synthetic construct
  source 1..23: mol_type = other RNA
agatgacttgggcaaaggtggaa

SEQ ID NO: 767 - RNA, 23 nt, synthetic construct
  source 1..23: mol_type = other RNA
gatgacttgggcaaaggtggaaa

SEQ ID NO: 768 - RNA, 23 nt, synthetic construct
  source 1..23: mol_type = other RNA
atgacttgggcaaaggtggaaat

SEQ ID NO: 769 - RNA, 23 nt, synthetic construct
  source 1..23: mol_type = other RNA
caaaggtggaaatgaagaaagta

SEQ ID NO: 770 - RNA, 23 nt, synthetic construct
  source 1..23: mol_type = other RNA
tcaatttcgagcagaaggaaagt

SEQ ID NO: 771 - RNA, 23 nt, synthetic construct
  source 1..23: mol_type = other RNA
tcgagcagaaggaaagtaatgga

SEQ ID NO: 772 - RNA, 23 nt, synthetic construct
  source 1..23: mol_type = other RNA
gcagaaggaaagtaatggaccag

SEQ ID NO: 773 - RNA, 23 nt, synthetic construct
  source 1..23: mol_type = other RNA
cagaaggaaagtaatggaccagt

SEQ ID NO: 774 - RNA, 23 nt, synthetic construct
  source 1..23: mol_type = other RNA
gaaggaaagtaatggaccagtga

SEQ ID NO: 775 - RNA, 23 nt, synthetic construct
  source 1..23: mol_type = other RNA
aaggaaagtaatggaccagtgaa

SEQ ID NO: 776 - RNA, 23 nt, synthetic construct
  source 1..23: mol_type = other RNA
aggaaagtaatggaccagtgaag

SEQ ID NO: 777 - RNA, 23 nt, synthetic construct
  source 1..23: mol_type = other RNA
ggaaagtaatggaccagtgaagg

SEQ ID NO: 778 - RNA, 23 nt, synthetic construct
  source 1..23: mol_type = other RNA
gaaagtaatggaccagtgaaggt

SEQ ID NO: 779 - RNA, 23 nt, synthetic construct
  source 1..23: mol_type = other RNA
aaagtaatggaccagtgaaggtg

SEQ ID NO: 780 - RNA, 23 nt, synthetic construct
  source 1..23: mol_type = other RNA
actgaaggcctgcatggattcca

SEQ ID NO: 781 - RNA, 23 nt, synthetic construct
  source 1..23: mol_type = other RNA
ctgaaggcctgcatggattccat

SEQ ID NO: 782 - RNA, 23 nt, synthetic construct
  source 1..23: mol_type = other RNA
gaaggcctgcatggattccatgt

SEQ ID NO: 783 - RNA, 23 nt, synthetic construct
  source 1..23: mol_type = other RNA
aaggcctgcatggattccatgtt

SEQ ID NO: 784 - RNA, 23 nt, synthetic construct
  source 1..23: mol_type = other RNA
aggcctgcatggattccatgttc

SEQ ID NO: 785 - RNA, 23 nt, synthetic construct
  source 1..23: mol_type = other RNA
ggcctgcatggattccatgttca

SEQ ID NO: 786 - RNA, 23 nt, synthetic construct
  source 1..23: mol_type = other RNA
gcctgcatggattccatgttcat

SEQ ID NO: 787 - RNA, 23 nt, synthetic construct
  source 1..23: mol_type = other RNA
acggtgggccaaaggatgaagag

SEQ ID NO: 788 - RNA, 23 nt, synthetic construct
  source 1..23: mol_type = other RNA
aggatgaagagaggcatgttgga

SEQ ID NO: 789 - RNA, 23 nt, synthetic construct
  source 1..23: mol_type = other RNA
gccaaaggatgaagagaggcatg

SEQ ID NO: 790 - RNA, 23 nt, synthetic construct
  source 1..23: mol_type = other RNA
caaaggatgaagagaggcatgtt

SEQ ID NO: 791 - RNA, 23 nt, synthetic construct
  source 1..23: mol_type = other RNA
aaaggatgaagagaggcatgttg

SEQ ID NO: 792 - RNA, 23 nt, synthetic construct
  source 1..23: mol_type = other RNA
aaggatgaagagaggcatgttgg

SEQ ID NO: 793 - RNA, 23 nt, synthetic construct
  source 1..23: mol_type = other RNA
ggatgaagagaggcatgttggag

SEQ ID NO: 794 - RNA, 23 nt, synthetic construct
  source 1..23: mol_type = other RNA
tgaagagaggcatgttggagacc

SEQ ID NO: 795 - RNA, 23 nt, synthetic construct
  source 1..23: mol_type = other RNA
cagatgacttgggcaaaggtgga

SEQ ID NO: 796 - RNA, 23 nt, synthetic construct
  source 1..23: mol_type = other RNA
tggtggtccatgaaaaagcagat

SEQ ID NO: 797 - RNA, 23 nt, synthetic construct
  source 1..23: mol_type = other RNA
ggtggtccatgaaaaagcagatg

SEQ ID NO: 798 - RNA, 23 nt, synthetic construct
  source 1..23: mol_type = other RNA
gtggtccatgaaaaagcagatga

SEQ ID NO: 799 - RNA, 23 nt, synthetic construct
  source 1..23: mol_type = other RNA
aagcagatgacttgggcaaaggt

SEQ ID NO: 800 - RNA, 23 nt, synthetic construct
  source 1..23: mol_type = other RNA
gcagatgacttgggcaaaggtgg

SEQ ID NO: 801 - RNA, 23 nt, synthetic construct
  source 1..23: mol_type = other RNA
tgacttgggcaaaggtggaaatg

SEQ ID NO: 802 - RNA, 23 nt, synthetic construct
  source 1..23: mol_type = other RNA
tggcttgtggtgtaattgggatc

SEQ ID NO: 803 - RNA, 23 nt, synthetic construct
  source 1..23: mol_type = other RNA
ggcttgtggtgtaattgggatcg

SEQ ID NO: 804 - RNA, 23 nt, synthetic construct
  source 1..23: mol_type = other RNA
gcttgtggtgtaattgggatcgc

SEQ ID NO: 805 - RNA, 23 nt, synthetic construct
  source 1..23: mol_type = other RNA
cttgtggtgtaattgggatcgcc

SEQ ID NO: 806 - RNA, 23 nt, synthetic construct
  source 1..23: mol_type = other RNA
ttgtggtgtaattgggatcgccc

SEQ ID NO: 807 - RNA, 23 nt, synthetic construct
  source 1..23: mol_type = other RNA
agtgcagggcatcatcaatttcg

SEQ ID NO: 808 - RNA, 23 nt, synthetic construct
  source 1..23: mol_type = other RNA
gtgcagggcatcatcaatttcga

SEQ ID NO: 809 - RNA, 23 nt, synthetic construct
  source 1..23: mol_type = other RNA
tgcagggcatcatcaatttcgag

SEQ ID NO: 810 - RNA, 23 nt, synthetic construct
  source 1..23: mol_type = other RNA
gcagggcatcatcaatttcgagc

SEQ ID NO: 811 - RNA, 23 nt, synthetic construct
  source 1..23: mol_type = other RNA
cagggcatcatcaatttcgagca

SEQ ID NO: 812 - RNA, 23 nt, synthetic construct
  source 1..23: mol_type = other RNA
agggcatcatcaatttcgagcag

SEQ ID NO: 813 - RNA, 23 nt, synthetic construct
  source 1..23: mol_type = other RNA
ggcatcatcaatttcgagcagaa

SEQ ID NO: 814 - RNA, 23 nt, synthetic construct
  source 1..23: mol_type = other RNA
gcatcatcaatttcgagcagaag

SEQ ID NO: 815 - RNA, 23 nt, synthetic construct
  source 1..23: mol_type = other RNA
catcatcaatttcgagcagaagg

SEQ ID NO: 816 - RNA, 23 nt, synthetic construct
  source 1..23: mol_type = other RNA
gcattaaaggactgactgaaggc

SEQ ID NO: 817 - RNA, 23 nt, synthetic construct
  source 1..23: mol_type = other RNA
tccatgttcatgagtttggagat

SEQ ID NO: 818 - RNA, 23 nt, synthetic construct
  source 1..23: mol_type = other RNA
atgttcatgagtttggagataat

SEQ ID NO: 819 - RNA, 23 nt, synthetic construct
  source 1..23: mol_type = other RNA
tgttcatgagtttggagataata

SEQ ID NO: 820 - RNA, 23 nt, synthetic construct
  source 1..23: mol_type = other RNA
tcatgagtttggagataatacag

SEQ ID NO: 821 - RNA, 23 nt, synthetic construct
  source 1..23: mol_type = other RNA
gatgtgtctattgaagattctgt

SEQ ID NO: 822 - RNA, 23 nt, synthetic construct
  source 1..23: mol_type = other RNA
atgtgtctattgaagattctgtg

SEQ ID NO: 823 - RNA, 23 nt, synthetic construct
  source 1..23: mol_type = other RNA
actggtggtccatgaaaaagcat

SEQ ID NO: 824 - RNA, 23 nt, synthetic construct
  source 1..23: mol_type = other RNA
ctggtggtccatgaaaaagcaga

SEQ ID NO: 825 - RNA, 23 nt, synthetic construct
  source 1..23: mol_type = other RNA
aggagaccattgcatcattggcc

SEQ ID NO: 826 - RNA, 23 nt, synthetic construct
  source 1..23: mol_type = other RNA
acactggtggtccatgaaaaagc

SEQ ID NO: 827 - RNA, 23 nt, synthetic construct
  source 1..23: mol_type = other RNA
cactggtggtccatgaaaaagca

SEQ ID NO: 828 - RNA, 23 nt, synthetic construct
  source 1..23: mol_type = other RNA
aaaggtggaaatgaagaaagtac

SEQ ID NO: 829 - RNA, 23 nt, synthetic construct
  source 1..23: mol_type = other RNA
aagaaagtacaaagacaggaaac

SEQ ID NO: 830 - RNA, 23 nt, synthetic construct
  source 1..23: mol_type = other RNA
agaaagtacaaagacaggaaacg

SEQ ID NO: 831 - RNA, 23 nt, synthetic construct
  source 1..23: mol_type = other RNA
gaaagtacaaagacaggaaacgc

SEQ ID NO: 832 - RNA, 23 nt, synthetic construct
  source 1..23: mol_type = other RNA
aaagtacaaagacaggaaacgct

SEQ ID NO: 833 - RNA, 23 nt, synthetic construct
  source 1..23: mol_type = other RNA
aagtacaaagacaggaaacgctg

SEQ ID NO: 834 - RNA, 23 nt, synthetic construct
  source 1..23: mol_type = other RNA
agtacaaagacaggaaacgctgg

SEQ ID NO: 835 - RNA, 23 nt, synthetic construct
  source 1..23: mol_type = other RNA
tacaaagacaggaaacgctggaa

SEQ ID NO: 836 - RNA, 23 nt, synthetic construct
  source 1..23: mol_type = other RNA
tttggcttgtggtgtaattggga

SEQ ID NO: 837 - RNA, 23 nt, synthetic construct
  source 1..23: mol_type = other RNA
ttggcttgtggtgtaattgggat

SEQ ID NO: 838 - RNA, 23 nt, synthetic construct
  source 1..23: mol_type = other RNA
aagtcgtttggcttgtggtgtaa

SEQ ID NO: 839 - RNA, 23 nt, synthetic construct
  source 1..23: mol_type = other RNA
agtcgtttggcttgtggtgtaat

SEQ ID NO: 840 - RNA, 23 nt, synthetic construct
  source 1..23: mol_type = other RNA
gtcgtttggcttgtggtgtaatt

SEQ ID NO: 841 - RNA, 23 nt, synthetic construct
  source 1..23: mol_type = other RNA
tcgtttggcttgtggtgtaattg

SEQ ID NO: 842 - RNA, 23 nt, synthetic construct
  source 1..23: mol_type = other RNA
cgtttggcttgtggtgtaattgg

SEQ ID NO: 843 - RNA, 23 nt, synthetic construct
  source 1..23: mol_type = other RNA
gtttggcttgtggtgtaattggg

SEQ ID NO: 844 - RNA, 23 nt, synthetic construct
  source 1..23: mol_type = other RNA
gtgtaattgggatcgcccaataa

SEQ ID NO: 845 - RNA, 21 nt, synthetic construct
  source 1..21: mol_type = other RNA
acggtgggccaaaggatgaat

SEQ ID NO: 846 - RNA, 23 nt, synthetic construct
  source 1..23: mol_type = other RNA
  modified_base 7: mod_base = OTHER; note = 5'-methyluridine-3'-phosphate
agaaattgatgatgccctgcact

SEQ ID NO: 847 - RNA, 23 nt, synthetic construct
  source 1..23: mol_type = other RNA
  modified_base 7: mod_base = OTHER; note = 5'-methyluridine-3'-phosphate
tcgaaattgatgatgccctgcac

SEQ ID NO: 848 - RNA, 23 nt, synthetic construct
  source 1..23: mol_type = other RNA
  modified_base 7: mod_base = OTHER; note = 5'-methyluridine-3'-phosphate
ttctgctcgaaattgatgatgcc

SEQ ID NO: 849 - RNA, 23 nt, synthetic construct
  source 1..23: mol_type = other RNA
  modified_base 7: mod_base = OTHER; note = 5'-methyluridine-3'-phosphate
ttactttccttctgctcgaaatt

SEQ ID NO: 850 - RNA, 23 nt, synthetic construct
  source 1..23: mol_type = other RNA
  modified_base 7: mod_base = OTHER; note = 5'-methyluridine-3'-phosphate
attactttccttctgctcgaaat

SEQ ID NO: 851 - RNA, 23 nt, synthetic construct
  source 1..23: mol_type = other RNA
  modified_base 7: mod_base = OTHER; note = 5'-methyluridine-3'-phosphate
attcactggtccattactttcct

SEQ ID NO: 852 - RNA, 23 nt, synthetic construct
  source 1..23: mol_type = other RNA
  modified_base 7: mod_base = OTHER; note = 5'-methyluridine-3'-phosphate
aacaccttcactggtccattact

SEQ ID NO: 853 - RNA, 23 nt, synthetic construct
  source 1..23: mol_type = other RNA
  modified_base 7: mod_base = OTHER; note = 5'-methyluridine-3'-phosphate
atggaatccatgcaggccttcag

SEQ ID NO: 854 - RNA, 23 nt, synthetic construct
  source 1..23: mol_type = other RNA
  modified_base 7: mod_base = OTHER; note = 5'-methyluridine-3'-phosphate
tgaacatggaatccatgcaggcc

SEQ ID NO: 855 - RNA, 23 nt, synthetic construct
  source 1..23: mol_type = other RNA
  modified_base 7: mod_base = OTHER; note = 5'-methyluridine-3'-phosphate
attatctccaaactcatgaacat

SEQ ID NO: 856 - RNA, 23 nt, synthetic construct
  source 1..23: mol_type = other RNA
  modified_base 7: mod_base = OTHER; note = 5'-methyluridine-3'-phosphate
atgtattatctccaaactcatga

SEQ ID NO: 857 - RNA, 23 nt, synthetic construct
  source 1..23: mol_type = other RNA
  modified_base 7: mod_base = OTHER; note = 5'-methyluridine-3'-phosphate
ttaaagtgaggacctgcactggt

SEQ ID NO: 858 - RNA, 23 nt, synthetic construct
  source 1..23: mol_type = other RNA
  modified_base 7: mod_base = OTHER; note = 5'-methyluridine-3'-phosphate
tctggatagaggattaaagtgag

SEQ ID NO: 859 - RNA, 23 nt, synthetic construct
  source 1..23: mol_type = other RNA
attcatcctttggcccaccgtgt

SEQ ID NO: 860 - RNA, 23 nt, synthetic construct
  source 1..23: mol_type = other RNA
  modified_base 7: mod_base = OTHER; note = 5'-methyluridine-3'-phosphate
aatgcctctcttcatcctttggc

SEQ ID NO: 861 - RNA, 23 nt, synthetic construct
  source 1..23: mol_type = other RNA
  modified_base 7: mod_base = OTHER; note = 5'-methyluridine-3'-phosphate
acaacatgcctctcttcatcctt

SEQ ID NO: 862 - RNA, 23 nt, synthetic construct
  source 1..23: mol_type = other RNA
  modified_base 7: mod_base = OTHER; note = 5'-methyluridine-3'-phosphate
acagaatcttcaatagacacatc

SEQ ID NO: 863 - RNA, 23 nt, synthetic construct
  source 1..23: mol_type = other RNA
  modified_base 7: mod_base = OTHER; note = 5'-methyluridine-3'-phosphate
agccaatgatgcaatggtctcct

SEQ ID NO: 864 - RNA, 23 nt, synthetic construct
  source 1..23: mol_type = other RNA
  modified_base 7: mod_base = OTHER; note = 5'-methyluridine-3'-phosphate
actttttcatggaccaccagtgt

SEQ ID NO: 865 - RNA, 23 nt, synthetic construct
  source 1..23: mol_type = other RNA
  modified_base 7: mod_base = OTHER; note = 5'-methyluridine-3'-phosphate
tgctttttcatggaccaccagtg

SEQ ID NO: 866 - RNA, 23 nt, synthetic construct
  source 1..23: mol_type = other RNA
  modified_base 7: mod_base = OTHER; note = 5'-methyluridine-3'-phosphate
atgctttttcatggaccaccagt

SEQ ID NO: 867 - RNA, 23 nt, synthetic construct
  source 1..23: mol_type = other RNA
  modified_base 7: mod_base = OTHER; note = 5'-methyluridine-3'-phosphate
tctgctttttcatggaccaccag

SEQ ID NO: 868 - RNA, 23 nt, synthetic construct
  source 1..23: mol_type = other RNA
  modified_base 7: mod_base = OTHER; note = 5'-methyluridine-3'-phosphate
atctgctttttcatggaccacca

SEQ ID NO: 869 - RNA, 23 nt, synthetic construct
  source 1..23: mol_type = other RNA
  modified_base 7: mod_base = OTHER; note = 5'-methyluridine-3'-phosphate
acacctttgcccaagtcatctgc

SEQ ID NO: 870 - RNA, 23 nt, synthetic construct
  source 1..23: mol_type = other RNA
  modified_base 7: mod_base = OTHER; note = 5'-methyluridine-3'-phosphate
tccacctttgcccaagtcatctg

SEQ ID NO: 871 - RNA, 23 nt, synthetic construct
  source 1..23: mol_type = other RNA
  modified_base 7: mod_base = OTHER; note = 5'-methyluridine-3'-phosphate
ttcatttccacctttgcccaagt

SEQ ID NO: 872 - RNA, 23 nt, synthetic construct
  source 1..23: mol_type = other RNA
  modified_base 7: mod_base = OTHER; note = 5'-methyluridine-3'-phosphate
atactttcttcatttccaccttt

SEQ ID NO: 873 - RNA, 23 nt, synthetic construct
  source 1..23: mol_type = other RNA
  modified_base 7: mod_base = OTHER; note = 5'-methyluridine-3'-phosphate
atttcctgtctttgtactttctt

SEQ ID NO: 874 - RNA, 23 nt, synthetic construct
  source 1..23: mol_type = other RNA
  modified_base 7: mod_base = OTHER; note = 5'-methyluridine-3'-phosphate
agcgtttcctgtctttgtacttt

SEQ ID NO: 875 - RNA, 23 nt, synthetic construct
  source 1..23: mol_type = other RNA
  modified_base 7: mod_base = OTHER; note = 5'-methyluridine-3'-phosphate
aagcgtttcctgtctttgtactt

SEQ ID NO: 876 - RNA, 23 nt, synthetic construct
  source 1..23: mol_type = other RNA
  modified_base 7: mod_base = OTHER; note = 5'-methyluridine-3'-phosphate
acagcgtttcctgtctttgtact

SEQ ID NO: 877 - RNA, 23 nt, synthetic construct
  source 1..23: mol_type = other RNA
  modified_base 7: mod_base = OTHER; note = 5'-methyluridine-3'-phosphate
accaattacaccacaagccaaac

SEQ ID NO: 878 - RNA, 23 nt, synthetic construct
  source 1..23: mol_type = other RNA
  modified_base 7: mod_base = OTHER; note = 5'-methyluridine-3'-phosphate
tcccaattacaccacaagccaaa

SEQ ID NO: 879 - RNA, 21 nt, synthetic construct
  source 1..21: mol_type = other RNA
  modified_base 1: mod_base = OTHER; note = 2'-O-methyladenosine-3'-phosphorothioate
  modified_base 2: mod_base = OTHER; note = 2'-O-methylcytidine-3'-phosphorothioate
  modified_base 3: mod_base = OTHER; note = 2'-O-methylguanosine-3'-phosphate
  modified_base 4: mod_base = OTHER; note = 2'-O-methylguanosine-3'-phosphate
  modified_base 5: mod_base = OTHER; note = 2'-O-methyluridine-3'-phosphate
  modified_base 6: mod_base = OTHER; note = 2'-O-methylguanosine-3'-phosphate
  modified_base 7: mod_base = OTHER; note = 2'-deoxy-2'-fluoroguanosine-3'-phosphate
  modified_base 8: mod_base = OTHER; note = 2'-O-methylguanosine-3'-phosphate
  modified_base 9: mod_base = OTHER; note = 2'-deoxy-2'-fluorocytidine-3'-phosphate
  modified_base 10: mod_base = OTHER; note = 2'-deoxy-2'-fluorocytidine-3'-phosphate
  modified_base 11: mod_base = OTHER; note = 2'-deoxy-2'-fluoroadenosine-3'-phosphate
  modified_base 12: mod_base = OTHER; note = 2'-O-methyladenosine-3'-phosphate
  modified_base 13: mod_base = OTHER; note = 2'-O-methyladenosine-3'-phosphate
  modified_base 14: mod_base = OTHER; note = 2'-O-methylguanosine-3'-phosphate
  modified_base 15: mod_base = OTHER; note = 2'-O-methylguanosine-3'-phosphate
  modified_base 16: mod_base = OTHER; note = 2'-O-methyladenosine-3'-phosphate
  modified_base 17: mod_base = OTHER; note = 2'-O-methyluridine-3'-phosphate
  modified_base 18: mod_base = OTHER; note = 2'-O-methylguanosine-3'-phosphate
  modified_base 19: mod_base = OTHER; note = 2'-O-methyladenosine-3'-phosphate
  modified_base 20: mod_base = OTHER; note = 2'-O-methyladenosine-3'-phosphate
  modified_base 21: mod_base = OTHER; note = 2'-O-methyluridine-3'-phosphate ((2S,4R)-1-[29-[[2-(acetylamino)-2-deoxy-beta-D-galactopyra nosyl]oxy]-14,14-bis[[3-[[3-[[5-[[2-(acetylamino)-2-deoxy-b eta-D-galactopyranosyl]oxy]-1-oxopentyl]amino]propyl]amino] -3-oxopropoxy]methyl]-1,12,19,25-tetraoxo-16-oxa-13,20,24-t riazanonacos-1-yl]-4-hydroxy-2-pyrrolidinyl)methyl ester
acggtgggccaaaggatgaat

SEQ ID NO: 880 - RNA, 23 nt, synthetic construct
  source 1..23: mol_type = other RNA
  modified_base 1: mod_base = OTHER; note = 2'-O-methyladenosine-3'-phosphorothioate
  modified_base 2: mod_base = OTHER; note = 2'-deoxy-2'-fluoroguanosine-3'-phosphorothioate
  modified_base 3: mod_base = OTHER; note = 2'-O-methyladenosine-3'-phosphate
  modified_base 4: mod_base = OTHER; note = 2'-O-methyladenosine-3'-phosphate
  modified_base 5: mod_base = OTHER; note = 2'-O-methyladenosine-3'-phosphate
  modified_base 6: mod_base = OTHER; note = 2'-O-methyluridine-3'-phosphate
  modified_base 7: mod_base = OTHER; note = Thymidine-glycol nucleic acid (GNA), S-Isomer
  modified_base 8: mod_base = OTHER; note = 2'-O-methylguanosine-3'-phosphate
  modified_base 9: mod_base = OTHER; note = 2'-O-methyladenosine-3'-phosphate
  modified_base 10: mod_base = OTHER; note = 2'-O-methyluridine-3'-phosphate
  modified_base 11: mod_base = OTHER; note = 2'-O-methylguanosine-3'-phosphate
  modified_base 12: mod_base = OTHER; note = 2'-O-methyladenosine-3'-phosphate
  modified_base 13: mod_base = OTHER; note = 2'-O-methyluridine-3'-phosphate
  modified_base 14: mod_base = OTHER; note = 2'-deoxy-2'-fluoroguanosine-3'-phosphate
  modified_base 15: mod_base = OTHER; note = 2'-O-methylcytidine-3'-phosphate
  modified_base 16: mod_base = OTHER; note = 2'-deoxy-2'-fluorocytidine-3'-phosphate
  modified_base 17: mod_base = OTHER; note = 2'-O-methylcytidine-3'-phosphate
  modified_base 18: mod_base = OTHER; note = 2'-O-methyluridine-3'-phosphate
  modified_base 19: mod_base = OTHER; note = 2'-O-methylguanosine-3'-phosphate
  modified_base 20: mod_base = OTHER; note = 2'-O-methylcytidine-3'-phosphate
  modified_base 21: mod_base = OTHER; note = 2'-O-methyladenosine-3'-phosphorothioate
  modified_base 22: mod_base = OTHER; note = 2'-O-methylcytidine-3'-phosphorothioate
  modified_base 23: mod_base = OTHER; note = 2'-O-methyluridine
agaaattgatgatgccctgcact

SEQ ID NO: 881 - RNA, 23 nt, synthetic construct
  source 1..23: mol_type = other RNA
  modified_base 1: mod_base = OTHER; note = 2'-O-methyluridine-3'-phosphorothioate
  modified_base 2: mod_base = OTHER; note = 2'-deoxy-2'-fluorocytidine-3'-phosphorothioate
  modified_base 3: mod_base = OTHER; note = 2'-O-methylguanosine-3'-phosphate
  modified_base 4: mod_base = OTHER; note = 2'-O-methyladenosine-3'-phosphate
  modified_base 5: mod_base = OTHER; note = 2'-O-methyladenosine-3'-phosphate
  modified_base 6: mod_base = OTHER; note = 2'-O-methyladenosine-3'-phosphate
  modified_base 7: mod_base = OTHER; note = Thymidine-glycol nucleic acid (GNA), S-Isomer
  modified_base 8: mod_base = OTHER; note = 2'-O-methyluridine-3'-phosphate
  modified_base 9: mod_base = OTHER; note = 2'-O-methylguanosine-3'-phosphate
  modified_base 10: mod_base = OTHER; note = 2'-O-methyladenosine-3'-phosphate
  modified_base 11: mod_base = OTHER; note = 2'-O-methyluridine-3'-phosphate
  modified_base 12: mod_base = OTHER; note = 2'-O-methylguanosine-3'-phosphate
  modified_base 13: mod_base = OTHER; note = 2'-O-methyladenosine-3'-phosphate
  modified_base 14: mod_base = OTHER; note = 2'-deoxy-2'-fluorouridine-3'-phosphate
  modified_base 15: mod_base = OTHER; note = 2'-O-methylguanosine-3'-phosphate
  modified_base 16: mod_base = OTHER; note = 2'-deoxy-2'-fluorocytidine-3'-phosphate
  modified_base 17: mod_base = OTHER; note = 2'-O-methylcytidine-3'-phosphate
  modified_base 18: mod_base = OTHER; note = 2'-O-methylcytidine-3'-phosphate
  modified_base 19: mod_base = OTHER; note = 2'-O-methyluridine-3'-phosphate
  modified_base 20: mod_base = OTHER; note = 2'-O-methylguanosine-3'-phosphate
  modified_base 21: mod_base = OTHER; note = 2'-O-methylcytidine-3'-phosphorothioate
  modified_base 22: mod_base = OTHER; note = 2'-O-methyladenosine-3'-phosphorothioate
  modified_base 23: mod_base = OTHER; note = 2'-O-methylcytidine
tcgaaattgatgatgccctgcac

SEQ ID NO: 882 - RNA, 23 nt, synthetic construct
  source 1..23: mol_type = other RNA
  modified_base 1: mod_base = OTHER; note = 2'-O-methyladenosine-3'-phosphorothioate
  modified_base 2: mod_base = OTHER; note = 2'-deoxy-2'-fluorouridine-3'-phosphorothioate
  modified_base 3: mod_base = OTHER; note = 2'-O-methylcytidine-3'-phosphate
  modified_base 4: mod_base = OTHER; note = 2'-O-methylguanosine-3'-phosphate
  modified_base 5: mod_base = OTHER; note = 2'-O-methyladenosine-3'-phosphate
  modified_base 6: mod_base = OTHER; note = 2'-O-methyladenosine-3'-phosphate
  modified_base 7: mod_base = OTHER; note = Adenosine-glycol nucleic acid (GNA), S-isomer
  modified_base 8: mod_base = OTHER; note = 2'-O-methyluridine-3'-phosphate
  modified_base 9: mod_base = OTHER; note = 2'-O-methyluridine-3'-phosphate
  modified_base 10: mod_base = OTHER; note = 2'-O-methylguanosine-3'-phosphate
  modified_base 11: mod_base = OTHER; note = 2'-O-methyladenosine-3'-phosphate
  modified_base 12: mod_base = OTHER; note = 2'-O-methyluridine-3'-phosphate
  modified_base 13: mod_base = OTHER; note = 2'-O-methylguanosine-3'-phosphate
  modified_base 14: mod_base = OTHER; note = 2'-deoxy-2'-fluoroadenosine-3'-phosphate
  modified_base 15: mod_base = OTHER; note = 2'-O-methyluridine-3'-phosphate
  modified_base 16: mod_base = OTHER; note = 2'-deoxy-2'-fluoroguanosine-3'-phosphate
  modified_base 17: mod_base = OTHER; note = 2'-O-methylcytidine-3'-phosphate
  modified_base 18: mod_base = OTHER; note = 2'-O-methylcytidine-3'-phosphate
  modified_base 19: mod_base = OTHER; note = 2'-O-methylcytidine-3'-phosphate
  modified_base 20: mod_base = OTHER; note = 2'-O-methyluridine-3'-phosphate
  modified_base 21: mod_base = OTHER; note = 2'-O-methylguanosine-3'-phosphorothioate
  modified_base 22: mod_base = OTHER; note = 2'-O-methylcytidine-3'-phosphorothioate
  modified_base 23: mod_base = OTHER; note = 2'-O-methyladenosine
atcgaaattgatgatgccctgca

SEQ ID NO: 883 - RNA, 23 nt, synthetic construct
  source 1..23: mol_type = other RNA
  modified_base 1: mod_base = OTHER; note = 2'-O-methyladenosine-3'-phosphorothioate
  modified_base 2: mod_base = OTHER; note = 2'-deoxy-2'-fluorocytidine-3'-phosphorothioate
  modified_base 3: mod_base = OTHER; note = 2'-O-methyluridine-3'-phosphate
  modified_base 4: mod_base = OTHER; note = 2'-O-methylcytidine-3'-phosphate
  modified_base 5: mod_base = OTHER; note = 2'-O-methylguanosine-3'-phosphate
  modified_base 6: mod_base = OTHER; note = 2'-O-methyladenosine-3'-phosphate
  modified_base 7: mod_base = OTHER; note = Adenosine-glycol nucleic acid (GNA), S-isomer
  modified_base 8: mod_base = OTHER; note = 2'-O-methyladenosine-3'-phosphate
  modified_base 9: mod_base = OTHER; note = 2'-O-methyluridine-3'-phosphate
  modified_base 10: mod_base = OTHER; note = 2'-O-methyluridine-3'-phosphate
  modified_base 11: mod_base = OTHER; note = 2'-O-methylguanosine-3'-phosphate
  modified_base 12: mod_base = OTHER; note = 2'-O-methyladenosine-3'-phosphate
  modified_base 13: mod_base = OTHER; note = 2'-O-methyluridine-3'-phosphate
  modified_base 14: mod_base = OTHER; note = 2'-deoxy-2'-fluoroguanosine-3'-phosphate
  modified_base 15: mod_base = OTHER; note = 2'-O-methyladenosine-3'-phosphate
  modified_base 16: mod_base = OTHER; note = 2'-deoxy-2'-fluorouridine-3'-phosphate
  modified_base 17: mod_base = OTHER; note = 2'-O-methylguanosine-3'-phosphate
  modified_base 18: mod_base = OTHER; note = 2'-O-methylcytidine-3'-phosphate
  modified_base 19: mod_base = OTHER; note = 2'-O-methylcytidine-3'-phosphate
  modified_base 20: mod_base = OTHER; note = 2'-O-methylcytidine-3'-phosphate
  modified_base 21: mod_base = OTHER; note = 2'-O-methyluridine-3'-phosphorothioate
  modified_base 22: mod_base = OTHER; note = 2'-O-methylguanosine-3'-phosphorothioate
  modified_base 23: mod_base = OTHER; note = 2'-O-methylcytidine
actcgaaattgatgatgccctgc

SEQ ID NO: 884 - RNA, 23 nt, synthetic construct
  source 1..23: mol_type = other RNA
  modified_base 1: mod_base = OTHER; note = 2'-O-methyluridine-3'-phosphorothioate
  modified_base 2: mod_base = OTHER; note = 2'-deoxy-2'-fluoroguanosine-3'-phosphorothioate
  modified_base 3: mod_base = OTHER; note = 2'-O-methylcytidine-3'-phosphate
  modified_base 4: mod_base = OTHER; note = 2'-O-methyluridine-3'-phosphate
  modified_base 5: mod_base = OTHER; note = 2'-O-methylcytidine-3'-phosphate
  modified_base 6: mod_base = OTHER; note = 2'-O-methylguanosine-3'-phosphate
  modified_base 7: mod_base = OTHER; note = Adenosine-glycol nucleic acid (GNA), S-isomer
  modified_base 8: mod_base = OTHER; note = 2'-O-methyladenosine-3'-phosphate
  modified_base 9: mod_base = OTHER; note = 2'-O-methyladenosine-3'-phosphate
  modified_base 10: mod_base = OTHER; note = 2'-O-methyluridine-3'-phosphate
  modified_base 11: mod_base = OTHER; note = 2'-O-methyluridine-3'-phosphate
  modified_base 12: mod_base = OTHER; note = 2'-O-methylguanosine-3'-phosphate
  modified_base 13: mod_base = OTHER; note = 2'-O-methyladenosine-3'-phosphate
  modified_base 14: mod_base = OTHER; note = 2'-deoxy-2'-fluorouridine-3'-phosphate
  modified_base 15: mod_base = OTHER; note = 2'-O-methylguanosine-3'-phosphate
  modified_base 16: mod_base = OTHER; note = 2'-deoxy-2'-fluoroadenosine-3'-phosphate
  modified_base 17: mod_base = OTHER; note = 2'-O-methyluridine-3'-phosphate
  modified_base 18: mod_base = OTHER; note = 2'-O-methylguanosine-3'-phosphate
  modified_base 19: mod_base = OTHER; note = 2'-O-methylcytidine-3'-phosphate
  modified_base 20: mod_base = OTHER; note = 2'-O-methylcytidine-3'-phosphate
  modified_base 21: mod_base = OTHER; note = 2'-O-methylcytidine-3'-phosphorothioate
  modified_base 22: mod_base = OTHER; note = 2'-O-methyluridine-3'-phosphorothioate
  modified_base 23: mod_base = OTHER; note = 2'-O-methylguanosine
tgctcgaaattgatgatgccctg

SEQ ID NO: 885 - RNA, 23 nt, synthetic construct
  source 1..23: mol_type = other RNA
  modified_base 1: mod_base = OTHER; note = 2'-O-methyladenosine-3'-phosphorothioate
  modified_base 2: mod_base = OTHER; note = 2'-deoxy-2'-fluorouridine-3'-phosphorothioate
  modified_base 3: mod_base = OTHER; note = 2'-O-methylguanosine-3'-phosphate
  modified_base 4: mod_base = OTHER; note = 2'-O-methylcytidine-3'-phosphate
  modified_base 5: mod_base = OTHER; note = 2'-O-methyluridine-3'-phosphate
  modified_base 6: mod_base = OTHER; note = 2'-O-methylcytidine-3'-phosphate
  modified_base 7: mod_base = OTHER; note = Guanosine-glycol nucleic acid (GNA), S-isomer
  modified_base 8: mod_base = OTHER; note = 2'-O-methyladenosine-3'-phosphate
  modified_base 9: mod_base = OTHER; note = 2'-O-methyladenosine-3'-phosphate
  modified_base 10: mod_base = OTHER; note = 2'-O-methyladenosine-3'-phosphate
  modified_base 11: mod_base = OTHER; note = 2'-O-methyluridine-3'-phosphate
  modified_base 12: mod_base = OTHER; note = 2'-O-methyluridine-3'-phosphate
  modified_base 13: mod_base = OTHER; note = 2'-O-methylguanosine-3'-phosphate
  modified_base 14: mod_base = OTHER; note = 2'-deoxy-2'-fluoroadenosine-3'-phosphate
  modified_base 15: mod_base = OTHER; note = 2'-O-methyluridine-3'-phosphate
  modified_base 16: mod_base = OTHER; note = 2'-deoxy-2'-fluoroguanosine-3'-phosphate
  modified_base 17: mod_base = OTHER; note = 2'-O-methyladenosine-3'-phosphate
  modified_base 18: mod_base = OTHER; note = 2'-O-methyluridine-3'-phosphate
  modified_base 19: mod_base = OTHER; note = 2'-O-methylguanosine-3'-phosphate
  modified_base 20: mod_base = OTHER; note = 2'-O-methylcytidine-3'-phosphate
  modified_base 21: mod_base = OTHER; note = 2'-O-methylcytidine-3'-phosphorothioate
  modified_base 22: mod_base = OTHER; note = 2'-O-methylcytidine-3'-phosphorothioate
  modified_base 23: mod_base = OTHER; note = 2'-O-methyluridine
atgctcgaaattgatgatgccct

SEQ ID NO: 886 - RNA, 23 nt, synthetic construct
  source 1..23: mol_type = other RNA
  modified_base 1: mod_base = OTHER; note = 2'-O-methyluridine-3'-phosphorothioate
  modified_base 2: mod_base = OTHER; note = 2'-deoxy-2'-fluorouridine-3'-phosphorothioate
  modified_base 3: mod_base = OTHER; note = 2'-O-methylcytidine-3'-phosphate
  modified_base 4: mod_base = OTHER; note = 2'-O-methyluridine-3'-phosphate
  modified_base 5: mod_base = OTHER; note = 2'-O-methylguanosine-3'-phosphate
  modified_base 6: mod_base = OTHER; note = 2'-O-methylcytidine-3'-phosphate
  modified_base 7: mod_base = OTHER; note = Thymidine-glycol nucleic acid (GNA), S-Isomer
  modified_base 8: mod_base = OTHER; note = 2'-O-methylcytidine-3'-phosphate
  modified_base 9: mod_base = OTHER; note = 2'-O-methylguanosine-3'-phosphate
  modified_base 10: mod_base = OTHER; note = 2'-O-methyladenosine-3'-phosphate
  modified_base 11: mod_base = OTHER; note = 2'-O-methyladenosine-3'-phosphate
  modified_base 12: mod_base = OTHER; note = 2'-O-methyladenosine-3'-phosphate
  modified_base 13: mod_base = OTHER; note = 2'-O-methyluridine-3'-phosphate
  modified_base 14: mod_base = OTHER; note = 2'-deoxy-2'-fluorouridine-3'-phosphate
  modified_base 15: mod_base = OTHER; note = 2'-O-methylguanosine-3'-phosphate
  modified_base 16: mod_base = OTHER; note = 2'-deoxy-2'-fluoroadenosine-3'-phosphate
  modified_base 17: mod_base = OTHER; note = 2'-O-methyluridine-3'-phosphate
  modified_base 18: mod_base = OTHER; note = 2'-O-methylguanosine-3'-phosphate
  modified_base 19: mod_base = OTHER; note = 2'-O-methyladenosine-3'-phosphate
  modified_base 20: mod_base = OTHER; note = 2'-O-methyluridine-3'-phosphate
  modified_base 21: mod_base = OTHER; note = 2'-O-methylguanosine-3'-phosphorothioate
  modified_base 22: mod_base = OTHER; note = 2'-O-methylcytidine-3'-phosphorothioate
  modified_base 23: mod_base = OTHER; note = 2'-O-methylcytidine
ttctgctcgaaattgatgatgcc

SEQ ID NO: 887 - RNA, 23 nt, synthetic construct
  source 1..23: mol_type = other RNA
  modified_base 1: mod_base = OTHER; note = 2'-O-methyladenosine-3'-phosphorothioate
  modified_base 2: mod_base = OTHER; note = 2'-deoxy-2'-fluorouridine-3'-phosphorothioate
  modified_base 3: mod_base = OTHER; note = 2'-O-methyluridine-3'-phosphate
  modified_base 4: mod_base = OTHER; note = 2'-O-methylcytidine-3'-phosphate
  modified_base 5: mod_base = OTHER; note = 2'-O-methyluridine-3'-phosphate
  modified_base 6: mod_base = OTHER; note = 2'-O-methylguanosine-3'-phosphate
  modified_base 7: mod_base = OTHER; note = Cytidine-glycol nucleic acid (GNA), S-isomer
  modified_base 8: mod_base = OTHER; note = 2'-O-methyluridine-3'-phosphate
  modified_base 9: mod_base = OTHER; note = 2'-O-methylcytidine-3'-phosphate
  modified_base 10: mod_base = OTHER; note = 2'-O-methylguanosine-3'-phosphate
  modified_base 11: mod_base = OTHER; note = 2'-O-methyladenosine-3'-phosphate
  modified_base 12: mod_base = OTHER; note = 2'-O-methyladenosine-3'-phosphate
  modified_base 13: mod_base = OTHER; note = 2'-O-methyladenosine-3'-phosphate
  modified_base 14: mod_base = OTHER; note = 2'-deoxy-2'-fluorouridine-3'-phosphate
  modified_base 15: mod_base = OTHER; note = 2'-O-methyluridine-3'-phosphate
  modified_base 16: mod_base = OTHER; note = 2'-deoxy-2'-fluoroguanosine-3'-phosphate
  modified_base 17: mod_base = OTHER; note = 2'-O-methyladenosine-3'-phosphate
  modified_base 18: mod_base = OTHER; note = 2'-O-methyluridine-3'-phosphate
  modified_base 19: mod_base = OTHER; note = 2'-O-methylguanosine-3'-phosphate
  modified_base 20: mod_base = OTHER; note = 2'-O-methyladenosine-3'-phosphate
  modified_base 21: mod_base = OTHER; note = 2'-O-methyluridine-3'-phosphorothioate
  modified_base 22: mod_base = OTHER; note = 2'-O-methylguanosine-3'-phosphorothioate
  modified_base 23: mod_base = OTHER; note = 2'-O-methylcytidine
attctgctcgaaattgatgatgc

SEQ ID NO: 888 - RNA, 23 nt, synthetic construct
  source 1..23: mol_type = other RNA
  modified_base 1: mod_base = OTHER; note = 2'-O-methyladenosine-3'-phosphorothioate
  modified_base 2: mod_base = OTHER; note = 2'-deoxy-2'-fluorocytidine-3'-phosphorothioate
  modified_base 3: mod_base = OTHER; note = 2'-O-methyluridine-3'-phosphate
  modified_base 4: mod_base = OTHER; note = 2'-O-methyluridine-3'-phosphate
  modified_base 5: mod_base = OTHER; note = 2'-O-methylcytidine-3'-phosphate
  modified_base 6: mod_base = OTHER; note = 2'-O-methyluridine-3'-phosphate
  modified_base 7: mod_base = OTHER; note = Guanosine-glycol nucleic acid (GNA), S-isomer
  modified_base 8: mod_base = OTHER; note = 2'-O-methylcytidine-3'-phosphate
  modified_base 9: mod_base = OTHER; note = 2'-O-methyluridine-3'-phosphate
  modified_base 10: mod_base = OTHER; note = 2'-O-methylcytidine-3'-phosphate
  modified_base 11: mod_base = OTHER; note = 2'-O-methylguanosine-3'-phosphate
  modified_base 12: mod_base = OTHER; note = 2'-O-methyladenosine-3'-phosphate
  modified_base 13: mod_base = OTHER; note = 2'-O-methyladenosine-3'-phosphate
  modified_base 14: mod_base = OTHER; note = 2'-deoxy-2'-fluoroadenosine-3'-phosphate
  modified_base 15: mod_base = OTHER; note = 2'-O-methyluridine-3'-phosphate
  modified_base 16: mod_base = OTHER; note = 2'-deoxy-2'-fluorouridine-3'-phosphate
  modified_base 17: mod_base = OTHER; note = 2'-O-methylguanosine-3'-phosphate
  modified_base 18: mod_base = OTHER; note = 2'-O-methyladenosine-3'-phosphate
  modified_base 19: mod_base = OTHER; note = 2'-O-methyluridine-3'-phosphate
  modified_base 20: mod_base = OTHER; note = 2'-O-methylguanosine-3'-phosphate
  modified_base 21: mod_base = OTHER; note = 2'-O-methyladenosine-3'-phosphorothioate
  modified_base 22: mod_base = OTHER; note = 2'-O-methyluridine-3'-phosphorothioate
  modified_base 23: mod_base = OTHER; note = 2'-O-methylguanosine
acttctgctcgaaattgatgatg

SEQ ID NO: 889 - RNA, 23 nt, synthetic construct
  source 1..23: mol_type = other RNA
  modified_base 1: mod_base = OTHER; note = 2'-O-methyladenosine-3'-phosphorothioate
  modified_base 2: mod_base = OTHER; note = 2'-deoxy-2'-fluorocytidine-3'-phosphorothioate
  modified_base 3: mod_base = OTHER; note = 2'-O-methyluridine-3'-phosphate
  modified_base 4: mod_base = OTHER; note = 2'-O-methyluridine-3'-phosphate
  modified_base 5: mod_base = OTHER; note = 2'-O-methyluridine-3'-phosphate
  modified_base 6: mod_base = OTHER; note = 2'-O-methylcytidine-3'-phosphate
  modified_base 7: mod_base = OTHER; note = Cytidine-glycol nucleic acid (GNA), S-isomer
  modified_base 8: mod_base = OTHER; note = 2'-O-methyluridine-3'-phosphate
  modified_base 9: mod_base = OTHER; note = 2'-O-methyluridine-3'-phosphate
  modified_base 10: mod_base = OTHER; note = 2'-O-methylcytidine-3'-phosphate
  modified_base 11: mod_base = OTHER; note = 2'-O-methyluridine-3'-phosphate
  modified_base 12: mod_base = OTHER; note = 2'-O-methylguanosine-3'-phosphate
  modified_base 13: mod_base = OTHER; note = 2'-O-methylcytidine-3'-phosphate
  modified_base 14: mod_base = OTHER; note = 2'-deoxy-2'-fluorouridine-3'-phosphate
  modified_base 15: mod_base = OTHER; note = 2'-O-methylcytidine-3'-phosphate
  modified_base 16: mod_base = OTHER; note = 2'-deoxy-2'-fluoroguanosine-3'-phosphate
  modified_base 17: mod_base = OTHER; note = 2'-O-methyladenosine-3'-phosphate
  modified_base 18: mod_base = OTHER; note = 2'-O-methyladenosine-3'-phosphate
  modified_base 19: mod_base = OTHER; note = 2'-O-methyladenosine-3'-phosphate
  modified_base 20: mod_base = OTHER; note = 2'-O-methyluridine-3'-phosphate
  modified_base 21: mod_base = OTHER; note = 2'-O-methyluridine-3'-phosphorothioate
  modified_base 22: mod_base = OTHER; note = 2'-O-methylguanosine-3'-phosphorothioate
  modified_base 23: mod_base = OTHER; note = 2'-O-methyladenosine
actttccttctgctcgaaattga

SEQ ID NO: 890 - RNA, 23 nt, synthetic construct
  source 1..23: mol_type = other RNA
  modified_base 1: mod_base = OTHER; note = 2'-O-methyluridine-3'-phosphorothioate
  modified_base 2: mod_base = OTHER; note = 2'-deoxy-2'-fluoroadenosine-3'-phosphorothioate
  modified_base 3: mod_base = OTHER; note = 2'-O-methylcytidine-3'-phosphate
  modified_base 4: mod_base = OTHER; note = 2'-O-methyluridine-3'-phosphate
  modified_base 5: mod_base = OTHER; note = 2'-O-methyluridine-3'-phosphate
  modified_base 6: mod_base = OTHER; note = 2'-O-methyluridine-3'-phosphate
  modified_base 7: mod_base = OTHER; note = Cytidine-glycol nucleic acid (GNA), S-isomer
  modified_base 8: mod_base = OTHER; note = 2'-O-methylcytidine-3'-phosphate
  modified_base 9: mod_base = OTHER; note = 2'-O-methyluridine-3'-phosphate
  modified_base 10: mod_base = OTHER; note = 2'-O-methyluridine-3'-phosphate
  modified_base 11: mod_base = OTHER; note = 2'-O-methylcytidine-3'-phosphate
  modified_base 12: mod_base = OTHER; note = 2'-O-methyluridine-3'-phosphate
  modified_base 13: mod_base = OTHER; note = 2'-O-methylguanosine-3'-phosphate
  modified_base 14: mod_base = OTHER; note = 2'-deoxy-2'-fluorocytidine-3'-phosphate
  modified_base 15: mod_base = OTHER; note = 2'-O-methyluridine-3'-phosphate
  modified_base 16: mod_base = OTHER; note = 2'-deoxy-2'-fluorocytidine-3'-phosphate
  modified_base 17: mod_base = OTHER; note = 2'-O-methylguanosine-3'-phosphate
  modified_base 18: mod_base = OTHER; note = 2'-O-methyladenosine-3'-phosphate
  modified_base 19: mod_base = OTHER; note = 2'-O-methyladenosine-3'-phosphate
  modified_base 20: mod_base = OTHER; note = 2'-O-methyladenosine-3'-phosphate
  modified_base 21: mod_base = OTHER; note = 2'-O-methyluridine-3'-phosphorothioate
  modified_base 22: mod_base = OTHER; note = 2'-O-methyluridine-3'-phosphorothioate
  modified_base 23: mod_base = OTHER; note = 2'-O-methylguanosine
tactttccttctgctcgaaattg

SEQ ID NO: 891 - RNA, 23 nt, synthetic construct
  source 1..23: mol_type = other RNA
  modified_base 1: mod_base = OTHER; note = 2'-O-methyluridine-3'-phosphorothioate
  modified_base 2: mod_base = OTHER; note = 2'-deoxy-2'-fluorouridine-3'-phosphorothioate
  modified_base 3: mod_base = OTHER; note = 2'-O-methyladenosine-3'-phosphate
  modified_base 4: mod_base = OTHER; note = 2'-O-methylcytidine-3'-phosphate
  modified_base 5: mod_base = OTHER; note = 2'-O-methyluridine-3'-phosphate
  modified_base 6: mod_base = OTHER; note = 2'-O-methyluridine-3'-phosphate
  modified_base 7: mod_base = OTHER; note = Thymidine-glycol nucleic acid (GNA), S-Isomer
  modified_base 8: mod_base = OTHER; note = 2'-O-methylcytidine-3'-phosphate
  modified_base 9: mod_base = OTHER; note = 2'-O-methylcytidine-3'-phosphate
  modified_base 10: mod_base = OTHER; note = 2'-O-methyluridine-3'-phosphate
  modified_base 11: mod_base = OTHER; note = 2'-O-methyluridine-3'-phosphate
  modified_base 12: mod_base = OTHER; note = 2'-O-methylcytidine-3'-phosphate
  modified_base 13: mod_base = OTHER; note = 2'-O-methyluridine-3'-phosphate
  modified_base 14: mod_base = OTHER; note = 2'-deoxy-2'-fluoroguanosine-3'-phosphate
  modified_base 15: mod_base = OTHER; note = 2'-O-methylcytidine-3'-phosphate
  modified_base 16: mod_base = OTHER; note = 2'-deoxy-2'-fluorouridine-3'-phosphate
  modified_base 17: mod_base = OTHER; note = 2'-O-methylcytidine-3'-phosphate
  modified_base 18: mod_base = OTHER; note = 2'-O-methylguanosine-3'-phosphate
  modified_base 19: mod_base = OTHER; note = 2'-O-methyladenosine-3'-phosphate
  modified_base 20: mod_base = OTHER; note = 2'-O-methyladenosine-3'-phosphate
  modified_base 21: mod_base = OTHER; note = 2'-O-methyladenosine-3'-phosphorothioate
  modified_base 22: mod_base = OTHER; note = 2'-O-methyluridine-3'-phosphorothioate
  modified_base 23: mod_base = OTHER; note = 2'-O-methyluridine
ttactttccttctgctcgaaatt

SEQ ID NO: 892 - RNA, 23 nt, synthetic construct
  source 1..23: mol_type = other RNA
  modified_base 1: mod_base = OTHER; note = 2'-O-methyladenosine-3'-phosphorothioate
  modified_base 2: mod_base = OTHER; note = 2'-deoxy-2'-fluorouridine-3'-phosphorothioate
  modified_base 3: mod_base = OTHER; note = 2'-O-methyluridine-3'-phosphate
  modified_base 4: mod_base = OTHER; note = 2'-O-methyladenosine-3'-phosphate
  modified_base 5: mod_base = OTHER; note = 2'-O-methylcytidine-3'-phosphate
  modified_base 6: mod_base = OTHER; note = 2'-O-methyluridine-3'-phosphate
  modified_base 7: mod_base = OTHER; note = Thymidine-glycol nucleic acid (GNA), S-Isomer
  modified_base 8: mod_base = OTHER; note = 2'-O-methyluridine-3'-phosphate
  modified_base 9: mod_base = OTHER; note = 2'-O-methylcytidine-3'-phosphate
  modified_base 10: mod_base = OTHER; note = 2'-O-methylcytidine-3'-phosphate
  modified_base 11: mod_base = OTHER; note = 2'-O-methyluridine-3'-phosphate
  modified_base 12: mod_base = OTHER; note = 2'-O-methyluridine-3'-phosphate
  modified_base 13: mod_base = OTHER; note = 2'-O-methylcytidine-3'-phosphate
  modified_base 14: mod_base = OTHER; note = 2'-deoxy-2'-fluorouridine-3'-phosphate
  modified_base 15: mod_base = OTHER; note = 2'-O-methylguanosine-3'-phosphate
  modified_base 16: mod_base = OTHER; note = 2'-deoxy-2'-fluorocytidine-3'-phosphate
  modified_base 17: mod_base = OTHER; note = 2'-O-methyluridine-3'-phosphate
  modified_base 18: mod_base = OTHER; note = 2'-O-methylcytidine-3'-phosphate
  modified_base 19: mod_base = OTHER; note = 2'-O-methylguanosine-3'-phosphate
  modified_base 20: mod_base = OTHER; note = 2'-O-methyladenosine-3'-phosphate
  modified_base 21: mod_base = OTHER; note = 2'-O-methyladenosine-3'-phosphorothioate
  modified_base 22: mod_base = OTHER; note = 2'-O-methyladenosine-3'-phosphorothioate
  modified_base 23: mod_base = OTHER; note = 2'-O-methyluridine
attactttccttctgctcgaaat

SEQ ID NO: 893 - RNA, 23 nt, synthetic construct
  source 1..23: mol_type = other RNA
  modified_base 1: mod_base = OTHER; note = 2'-O-methyluridine-3'-phosphorothioate
  modified_base 2: mod_base = OTHER; note = 2'-deoxy-2'-fluorocytidine-3'-phosphorothioate
  modified_base 3: mod_base = OTHER; note = 2'-O-methylcytidine-3'-phosphate
  modified_base 4: mod_base = OTHER; note = 2'-O-methyladenosine-3'-phosphate
  modified_base 5: mod_base = OTHER; note = 2'-O-methyluridine-3'-phosphate
  modified_base 6: mod_base = OTHER; note = 2'-O-methyluridine-3'-phosphate
  modified_base 7: mod_base = OTHER; note = Adenosine-glycol nucleic acid (GNA), S-isomer
  modified_base 8: mod_base = OTHER; note = 2'-O-methylcytidine-3'-phosphate
  modified_base 9: mod_base = OTHER; note = 2'-O-methyluridine-3'-phosphate
  modified_base 10: mod_base = OTHER; note = 2'-O-methyluridine-3'-phosphate
  modified_base 11: mod_base = OTHER; note = 2'-O-methyluridine-3'-phosphate
  modified_base 12: mod_base = OTHER; note = 2'-O-methylcytidine-3'-phosphate
  modified_base 13: mod_base = OTHER; note = 2'-O-methylcytidine-3'-phosphate
  modified_base 14: mod_base = OTHER; note = 2'-deoxy-2'-fluorouridine-3'-phosphate
  modified_base 15: mod_base = OTHER; note = 2'-O-methyluridine-3'-phosphate
  modified_base 16: mod_base = OTHER; note = 2'-deoxy-2'-fluorocytidine-3'-phosphate
  modified_base 17: mod_base = OTHER; note = 2'-O-methyluridine-3'-phosphate
  modified_base 18: mod_base = OTHER; note = 2'-O-methylguanosine-3'-phosphate
  modified_base 19: mod_base = OTHER; note = 2'-O-methylcytidine-3'-phosphate
  modified_base 20: mod_base = OTHER; note = 2'-O-methyluridine-3'-phosphate
  modified_base 21: mod_base = OTHER; note = 2'-O-methylcytidine-3'-phosphorothioate
  modified_base 22: mod_base = OTHER; note = 2'-O-methylguanosine-3'-phosphorothioate
  modified_base 23: mod_base = OTHER; note = 2'-O-methyladenosine
tccattactttccttctgctcga

SEQ ID NO: 894 - RNA, 23 nt, synthetic construct
  source 1..23: mol_type = other RNA
  modified_base 1: mod_base = OTHER; note = 2'-O-methyladenosine-3'-phosphorothioate
  modified_base 2: mod_base = OTHER; note = 2'-deoxy-2'-fluorouridine-3'-phosphorothioate
  modified_base 3: mod_base = OTHER; note = 2'-O-methylguanosine-3'-phosphate
  modified_base 4: mod_base = OTHER; note = 2'-O-methylguanosine-3'-phosphate
  modified_base 5: mod_base = OTHER; note = 2'-O-methyluridine-3'-phosphate
  modified_base 6: mod_base = OTHER; note = 2'-O-methylcytidine-3'-phosphate
  modified_base 7: mod_base = OTHER; note = Cytidine-glycol nucleic acid (GNA), S-isomer
  modified_base 8: mod_base = OTHER; note = 2'-O-methyladenosine-3'-phosphate
  modified_base 9: mod_base = OTHER; note = 2'-O-methyluridine-3'-phosphate
  modified_base 10: mod_base = OTHER; note = 2'-O-methyluridine-3'-phosphate
  modified_base 11: mod_base = OTHER; note = 2'-O-methyladenosine-3'-phosphate
  modified_base 12: mod_base = OTHER; note = 2'-O-methylcytidine-3'-phosphate
  modified_base 13: mod_base = OTHER; note = 2'-O-methyluridine-3'-phosphate
  modified_base 14: mod_base = OTHER; note = 2'-deoxy-2'-fluorouridine-3'-phosphate
  modified_base 15: mod_base = OTHER; note = 2'-O-methyluridine-3'-phosphate
  modified_base 16: mod_base = OTHER; note = 2'-deoxy-2'-fluorocytidine-3'-phosphate
  modified_base 17: mod_base = OTHER; note = 2'-O-methylcytidine-3'-phosphate
  modified_base 18: mod_base = OTHER; note = 2'-O-methyluridine-3'-phosphate
  modified_base 19: mod_base = OTHER; note = 2'-O-methyluridine-3'-phosphate
  modified_base 20: mod_base = OTHER; note = 2'-O-methylcytidine-3'-phosphate
  modified_base 21: mod_base = OTHER; note = 2'-O-methyluridine-3'-phosphorothioate
  modified_base 22: mod_base = OTHER; note = 2'-O-methylguanosine-3'-phosphorothioate
  modified_base 23: mod_base = OTHER; note = 2'-O-methylcytidine
atggtccattactttccttctgc

SEQ ID NO: 895 - RNA, 23 nt, synthetic construct
  source 1..23: mol_type = other RNA
  modified_base 1: mod_base = OTHER; note = 2'-O-methyladenosine-3'-phosphorothioate
  modified_base 2: mod_base = OTHER; note = 2'-deoxy-2'-fluorocytidine-3'-phosphorothioate
  modified_base 3: mod_base = OTHER; note = 2'-O-methyluridine-3'-phosphate
  modified_base 4: mod_base = OTHER; note = 2'-O-methylguanosine-3'-phosphate
  modified_base 5: mod_base = OTHER; note = 2'-O-methylguanosine-3'-phosphate
  modified_base 6: mod_base = OTHER; note = 2'-O-methyluridine-3'-phosphate
  modified_base 7: mod_base = OTHER; note = Cytidine-glycol nucleic acid (GNA), S-isomer
  modified_base 8: mod_base = OTHER; note = 2'-O-methylcytidine-3'-phosphate
  modified_base 9: mod_base = OTHER; note = 2'-O-methyladenosine-3'-phosphate
  modified_base 10: mod_base = OTHER; note = 2'-O-methyluridine-3'-phosphate
  modified_base 11: mod_base = OTHER; note = 2'-O-methyluridine-3'-phosphate
  modified_base 12: mod_base = OTHER; note = 2'-O-methyladenosine-3'-phosphate
  modified_base 13: mod_base = OTHER; note = 2'-O-methylcytidine-3'-phosphate
  modified_base 14: mod_base = OTHER; note = 2'-deoxy-2'-fluorouridine-3'-phosphate
  modified_base 15: mod_base = OTHER; note = 2'-O-methyluridine-3'-phosphate
  modified_base 16: mod_base = OTHER; note = 2'-deoxy-2'-fluorouridine-3'-phosphate
  modified_base 17: mod_base = OTHER; note = 2'-O-methylcytidine-3'-phosphate
  modified_base 18: mod_base = OTHER; note = 2'-O-methylcytidine-3'-phosphate
  modified_base 19: mod_base = OTHER; note = 2'-O-methyluridine-3'-phosphate
  modified_base 20: mod_base = OTHER; note = 2'-O-methyluridine-3'-phosphate
  modified_base 21: mod_base = OTHER; note = 2'-O-methylcytidine-3'-phosphorothioate
  modified_base 22: mod_base = OTHER; note = 2'-O-methyluridine-3'-phosphorothioate
  modified_base 23: mod_base = OTHER; note = 2'-O-methylguanosine
actggtccattactttccttctg

SEQ ID NO: 896 - RNA, 23 nt, synthetic construct
  source 1..23: mol_type = other RNA
  modified_base 1: mod_base = OTHER; note = 2'-O-methyluridine-3'-phosphorothioate
  modified_base 2: mod_base = OTHER; note = 2'-deoxy-2'-fluorocytidine-3'-phosphorothioate
  modified_base 3: mod_base = OTHER; note = 2'-O-methyladenosine-3'-phosphate
  modified_base 4: mod_base = OTHER; note = 2'-O-methylcytidine-3'-phosphate
  modified_base 5: mod_base = OTHER; note = 2'-O-methyluridine-3'-phosphate
  modified_base 6: mod_base = OTHER; note = 2'-O-methylguanosine-3'-phosphate
  modified_base 7: mod_base = OTHER; note = Guanosine-glycol nucleic acid (GNA), S-isomer
  modified_base 8: mod_base = OTHER; note = 2'-O-methyluridine-3'-phosphate
  modified_base 9: mod_base = OTHER; note = 2'-O-methylcytidine-3'-phosphate
  modified_base 10: mod_base = OTHER; note = 2'-O-methylcytidine-3'-phosphate
  modified_base 11: mod_base = OTHER; note = 2'-O-methyladenosine-3'-phosphate
  modified_base 12: mod_base = OTHER; note = 2'-O-methyluridine-3'-phosphate
  modified_base 13: mod_base = OTHER; note = 2'-O-methyluridine-3'-phosphate
  modified_base 14: mod_base = OTHER; note = 2'-deoxy-2'-fluoroadenosine-3'-phosphate
  modified_base 15: mod_base = OTHER; note = 2'-O-methylcytidine-3'-phosphate
  modified_base 16: mod_base = OTHER; note = 2'-deoxy-2'-fluorouridine-3'-phosphate
  modified_base 17: mod_base = OTHER; note = 2'-O-methyluridine-3'-phosphate
  modified_base 18: mod_base = OTHER; note = 2'-O-methyluridine-3'-phosphate
  modified_base 19: mod_base = OTHER; note = 2'-O-methylcytidine-3'-phosphate
  modified_base 20: mod_base = OTHER; note = 2'-O-methylcytidine-3'-phosphate
  modified_base 21: mod_base = OTHER; note = 2'-O-methyluridine-3'-phosphorothioate
  modified_base 22: mod_base = OTHER; note = 2'-O-methyluridine-3'-phosphorothioate
  modified_base 23: mod_base = OTHER; note = 2'-O-methylcytidine
tcactggtccattactttccttc

SEQ ID NO: 897 - RNA, 23 nt, synthetic construct
  source 1..23: mol_type = other RNA
  modified_base 1: mod_base = OTHER; note = 2'-O-methyluridine-3'-phosphorothioate
  modified_base 2: mod_base = OTHER; note = 2'-deoxy-2'-fluorouridine-3'-phosphorothioate
  modified_base 3: mod_base = OTHER; note = 2'-O-methylcytidine-3'-phosphate
  modified_base 4: mod_base = OTHER; note = 2'-O-methyladenosine-3'-phosphate
  modified_base 5: mod_base = OTHER; note = 2'-O-methylcytidine-3'-phosphate
  modified_base 6: mod_base = OTHER; note = 2'-O-methyluridine-3'-phosphate
  modified_base 7: mod_base = OTHER; note = Guanosine-glycol nucleic acid (GNA), S-isomer
  modified_base 8: mod_base = OTHER; note = 2'-O-methylguanosine-3'-phosphate
  modified_base 9: mod_base = OTHER; note = 2'-O-methyluridine-3'-phosphate
  modified_base 10: mod_base = OTHER; note = 2'-O-methylcytidine-3'-phosphate
  modified_base 11: mod_base = OTHER; note = 2'-O-methylcytidine-3'-phosphate
  modified_base 12: mod_base = OTHER; note = 2'-O-methyladenosine-3'-phosphate
  modified_base 13: mod_base = OTHER; note = 2'-O-methyluridine-3'-phosphate
  modified_base 14: mod_base = OTHER; note = 2'-deoxy-2'-fluorouridine-3'-phosphate
  modified_base 15: mod_base = OTHER; note = 2'-O-methyladenosine-3'-phosphate
  modified_base 16: mod_base = OTHER; note = 2'-deoxy-2'-fluorocytidine-3'-phosphate
  modified_base 17: mod_base = OTHER; note = 2'-O-methyluridine-3'-phosphate
  modified_base 18: mod_base = OTHER; note = 2'-O-methyluridine-3'-phosphate
  modified_base 19: mod_base = OTHER; note = 2'-O-methyluridine-3'-phosphate
  modified_base 20: mod_base = OTHER; note = 2'-O-methylcytidine-3'-phosphate
  modified_base 21: mod_base = OTHER; note = 2'-O-methylcytidine-3'-phosphorothioate
  modified_base 22: mod_base = OTHER; note = 2'-O-methyluridine-3'-phosphorothioate
  modified_base 23: mod_base = OTHER; note = 2'-O-methyluridine
ttcactggtccattactttcctt

SEQ ID NO: 898 - RNA, 23 nt, synthetic construct
  source 1..23: mol_type = other RNA
  modified_base 1: mod_base = OTHER; note = 2'-O-methyladenosine-3'-phosphorothioate
  modified_base 2: mod_base = OTHER; note = 2'-deoxy-2'-fluorouridine-3'-phosphorothioate
  modified_base 3: mod_base = OTHER; note = 2'-O-methyluridine-3'-phosphate
  modified_base 4: mod_base = OTHER; note = 2'-O-methylcytidine-3'-phosphate
  modified_base 5: mod_base = OTHER; note = 2'-O-methyladenosine-3'-phosphate
  modified_base 6: mod_base = OTHER; note = 2'-O-methylcytidine-3'-phosphate
  modified_base 7: mod_base = OTHER; note = Thymidine-glycol nucleic acid (GNA), S-Isomer
  modified_base 8: mod_base = OTHER; note = 2'-O-methylguanosine-3'-phosphate
  modified_base 9: mod_base = OTHER; note = 2'-O-methylguanosine-3'-phosphate
  modified_base 10: mod_base = OTHER; note = 2'-O-methyluridine-3'-phosphate
  modified_base 11: mod_base = OTHER; note = 2'-O-methylcytidine-3'-phosphate
  modified_base 12: mod_base = OTHER; note = 2'-O-methylcytidine-3'-phosphate
  modified_base 13: mod_base = OTHER; note = 2'-O-methyladenosine-3'-phosphate
  modified_base 14: mod_base = OTHER; note = 2'-deoxy-2'-fluorouridine-3'-phosphate
  modified_base 15: mod_base = OTHER; note = 2'-O-methyluridine-3'-phosphate
  modified_base 16: mod_base = OTHER; note = 2'-deoxy-2'-fluoroadenosine-3'-phosphate
  modified_base 17: mod_base = OTHER; note = 2'-O-methylcytidine-3'-phosphate
  modified_base 18: mod_base = OTHER; note = 2'-O-methyluridine-3'-phosphate
  modified_base 19: mod_base = OTHER; note = 2'-O-methyluridine-3'-phosphate
  modified_base 20: mod_base = OTHER; note = 2'-O-methyluridine-3'-phosphate
  modified_base 21: mod_base = OTHER; note = 2'-O-methylcytidine-3'-phosphorothioate
  modified_base 22: mod_base = OTHER; note = 2'-O-methylcytidine-3'-phosphorothioate
  modified_base 23: mod_base = OTHER; note = 2'-O-methyluridine
attcactggtccattactttcct

SEQ ID NO: 899 - RNA, 23 nt, synthetic construct
  source 1..23: mol_type = other RNA
  modified_base 1: mod_base = OTHER; note = 2'-O-methyladenosine-3'-phosphorothioate
  modified_base 2: mod_base = OTHER; note = 2'-deoxy-2'-fluorocytidine-3'-phosphorothioate
  modified_base 3: mod_base = OTHER; note = 2'-O-methyluridine-3'-phosphate
  modified_base 4: mod_base = OTHER; note = 2'-O-methyluridine-3'-phosphate
  modified_base 5: mod_base = OTHER; note = 2'-O-methylcytidine-3'-phosphate
  modified_base 6: mod_base = OTHER; note = 2'-O-methyladenosine-3'-phosphate
  modified_base 7: mod_base = OTHER; note = Cytidine-glycol nucleic acid (GNA), S-isomer
  modified_base 8: mod_base = OTHER; note = 2'-O-methyluridine-3'-phosphate
  modified_base 9: mod_base = OTHER; note = 2'-O-methylguanosine-3'-phosphate
  modified_base 10: mod_base = OTHER; note = 2'-O-methylguanosine-3'-phosphate
  modified_base 11: mod_base = OTHER; note = 2'-O-methyluridine-3'-phosphate
  modified_base 12: mod_base = OTHER; note = 2'-O-methylcytidine-3'-phosphate
  modified_base 13: mod_base = OTHER; note = 2'-O-methylcytidine-3'-phosphate
  modified_base 14: mod_base = OTHER; note = 2'-deoxy-2'-fluoroadenosine-3'-phosphate
  modified_base 15: mod_base = OTHER; note = 2'-O-methyluridine-3'-phosphate
  modified_base 16: mod_base = OTHER; note = 2'-deoxy-2'-fluorouridine-3'-phosphate
  modified_base 17: mod_base = OTHER; note = 2'-O-methyladenosine-3'-phosphate
  modified_base 18: mod_base = OTHER; note = 2'-O-methylcytidine-3'-phosphate
  modified_base 19: mod_base = OTHER; note = 2'-O-methyluridine-3'-phosphate
  modified_base 20: mod_base = OTHER; note = 2'-O-methyluridine-3'-phosphate
  modified_base 21: mod_base = OTHER; note = 2'-O-methyluridine-3'-phosphorothioate
  modified_base 22: mod_base = OTHER; note = 2'-O-methylcytidine-3'-phosphorothioate
  modified_base 23: mod_base = OTHER; note = 2'-O-methylcytidine
acttcactggtccattactttcc

SEQ ID NO: 900 - RNA, 23 nt, synthetic construct
  source 1..23: mol_type = other RNA
  modified_base 1: mod_base = OTHER; note = 2'-O-methyladenosine-3'-phosphorothioate
  modified_base 2: mod_base = OTHER; note = 2'-deoxy-2'-fluorocytidine-3'-phosphorothioate
  modified_base 3: mod_base = OTHER; note = 2'-O-methylcytidine-3'-phosphate
  modified_base 4: mod_base = OTHER; note = 2'-O-methyluridine-3'-phosphate
  modified_base 5: mod_base = OTHER; note = 2'-O-methyluridine-3'-phosphate
  modified_base 6: mod_base = OTHER; note = 2'-O-methylcytidine-3'-phosphate
  modified_base 7: mod_base = OTHER; note = Adenosine-glycol nucleic acid (GNA), S-isomer
  modified_base 8: mod_base = OTHER; note = 2'-O-methylcytidine-3'-phosphate
  modified_base 9: mod_base = OTHER; note = 2'-O-methyluridine-3'-phosphate
  modified_base 10: mod_base = OTHER; note = 2'-O-methylguanosine-3'-phosphate
  modified_base 11: mod_base = OTHER; note = 2'-O-methylguanosine-3'-phosphate
  modified_base 12: mod_base = OTHER; note = 2'-O-methyluridine-3'-phosphate
  modified_base 13: mod_base = OTHER; note = 2'-O-methylcytidine-3'-phosphate
  modified_base 14: mod_base = OTHER; note = 2'-deoxy-2'-fluorocytidine-3'-phosphate
  modified_base 15: mod_base = OTHER; note = 2'-O-methyladenosine-3'-phosphate
  modified_base 16: mod_base = OTHER; note = 2'-deoxy-2'-fluorouridine-3'-phosphate
  modified_base 17: mod_base = OTHER; note = 2'-O-methyluridine-3'-phosphate
  modified_base 18: mod_base = OTHER; note = 2'-O-methyladenosine-3'-phosphate
  modified_base 19: mod_base = OTHER; note = 2'-O-methylcytidine-3'-phosphate
  modified_base 20: mod_base = OTHER; note = 2'-O-methyluridine-3'-phosphate
  modified_base 21: mod_base = OTHER; note = 2'-O-methyluridine-3'-phosphorothioate
  modified_base 22: mod_base = OTHER; note = 2'-O-methyluridine-3'-phosphorothioate
  modified_base 23: mod_base = OTHER; note = 2'-O-methylcytidine
accttcactggtccattactttc

SEQ ID NO: 901 - RNA, 23 nt, synthetic construct
  source 1..23: mol_type = other RNA
  modified_base 1: mod_base = OTHER; note = 2'-O-methyladenosine-3'-phosphorothioate
  modified_base 2: mod_base = OTHER; note = 2'-deoxy-2'-fluoroadenosine-3'-phosphorothioate
  modified_base 3: mod_base = OTHER; note = 2'-O-methylcytidine-3'-phosphate
  modified_base 4: mod_base = OTHER; note = 2'-O-methylcytidine-3'-phosphate
  modified_base 5: mod_base = OTHER; note = 2'-O-methyluridine-3'-phosphate
  modified_base 6: mod_base = OTHER; note = 2'-O-methyluridine-3'-phosphate
  modified_base 7: mod_base = OTHER; note = Cytidine-glycol nucleic acid (GNA), S-isomer
  modified_base 8: mod_base = OTHER; note = 2'-O-methyladenosine-3'-phosphate
  modified_base 9: mod_base = OTHER; note = 2'-O-methylcytidine-3'-phosphate
  modified_base 10: mod_base = OTHER; note = 2'-O-methyluridine-3'-phosphate
  modified_base 11: mod_base = OTHER; note = 2'-O-methylguanosine-3'-phosphate
  modified_base 12: mod_base = OTHER; note = 2'-O-methylguanosine-3'-phosphate
  modified_base 13: mod_base = OTHER; note = 2'-O-methyluridine-3'-phosphate
  modified_base 14: mod_base = OTHER; note = 2'-deoxy-2'-fluorocytidine-3'-phosphate
  modified_base 15: mod_base = OTHER; note = 2'-O-methylcytidine-3'-phosphate
  modified_base 16: mod_base = OTHER; note = 2'-deoxy-2'-fluoroadenosine-3'-phosphate
  modified_base 17: mod_base = OTHER; note = 2'-O-methyluridine-3'-phosphate
  modified_base 18: mod_base = OTHER; note = 2'-O-methyluridine-3'-phosphate
  modified_base 19: mod_base = OTHER; note = 2'-O-methyladenosine-3'-phosphate
  modified_base 20: mod_base = OTHER; note = 2'-O-methylcytidine-3'-phosphate
  modified_base 21: mod_base = OTHER; note = 2'-O-methyluridine-3'-phosphorothioate
  modified_base 22: mod_base = OTHER; note = 2'-O-methyluridine-3'-phosphorothioate
  modified_base 23: mod_base = OTHER; note = 2'-O-methyluridine
aaccttcactggtccattacttt

SEQ ID NO: 902 - RNA, 23 nt, synthetic construct
  source 1..23: mol_type = other RNA
  modified_base 1: mod_base = OTHER; note = 2'-O-methyladenosine-3'-phosphorothioate
  modified_base 2: mod_base = OTHER; note = 2'-deoxy-2'-fluoroadenosine-3'-phosphorothioate
  modified_base 3: mod_base = OTHER; note = 2'-O-methylcytidine-3'-phosphate
  modified_base 4: mod_base = OTHER; note = 2'-O-methyladenosine-3'-phosphate
  modified_base 5: mod_base = OTHER; note = 2'-O-methylcytidine-3'-phosphate
  modified_base 6: mod_base = OTHER; note = 2'-O-methylcytidine-3'-phosphate
  modified_base 7: mod_base = OTHER; note = Thymidine-glycol nucleic acid (GNA), S-Isomer
  modified_base 8: mod_base = OTHER; note = 2'-O-methyluridine-3'-phosphate
  modified_base 9: mod_base = OTHER; note = 2'-O-methylcytidine-3'-phosphate
  modified_base 10: mod_base = OTHER; note = 2'-O-methyladenosine-3'-phosphate
  modified_base 11: mod_base = OTHER; note = 2'-O-methylcytidine-3'-phosphate
  modified_base 12: mod_base = OTHER; note = 2'-O-methyluridine-3'-phosphate
  modified_base 13: mod_base = OTHER; note = 2'-O-methylguanosine-3'-phosphate
  modified_base 14: mod_base = OTHER; note = 2'-deoxy-2'-fluoroguanosine-3'-phosphate
  modified_base 15: mod_base = OTHER; note = 2'-O-methyluridine-3'-phosphate
  modified_base 16: mod_base = OTHER; note = 2'-deoxy-2'-fluorocytidine-3'-phosphate
  modified_base 17: mod_base = OTHER; note = 2'-O-methylcytidine-3'-phosphate
  modified_base 18: mod_base = OTHER; note = 2'-O-methyladenosine-3'-phosphate
  modified_base 19: mod_base = OTHER; note = 2'-O-methyluridine-3'-phosphate
  modified_base 20: mod_base = OTHER; note = 2'-O-methyluridine-3'-phosphate
  modified_base 21: mod_base = OTHER; note = 2'-O-methyladenosine-3'-phosphorothioate
  modified_base 22: mod_base = OTHER; note = 2'-O-methylcytidine-3'-phosphorothioate
  modified_base 23: mod_base = OTHER; note = 2'-O-methyluridine
aacaccttcactggtccattact

SEQ ID NO: 903 - RNA, 23 nt, synthetic construct
  source 1..23: mol_type = other RNA
  modified_base 1: mod_base = OTHER; note = 2'-O-methyladenosine-3'-phosphorothioate
  modified_base 2: mod_base = OTHER; note = 2'-deoxy-2'-fluorocytidine-3'-phosphorothioate
  modified_base 3: mod_base = OTHER; note = 2'-O-methylcytidine-3'-phosphate
  modified_base 4: mod_base = OTHER; note = 2'-O-methyluridine-3'-phosphate
  modified_base 5: mod_base = OTHER; note = 2'-O-methyluridine-3'-phosphate
  modified_base 6: mod_base = OTHER; note = 2'-O-methylcytidine-3'-phosphate
  modified_base 7: mod_base = OTHER; note = Adenosine-glycol nucleic acid (GNA), S-isomer
  modified_base 8: mod_base = OTHER; note = 2'-O-methylguanosine-3'-phosphate
  modified_base 9: mod_base = OTHER; note = 2'-O-methyluridine-3'-phosphate
  modified_base 10: mod_base = OTHER; note = 2'-O-methylcytidine-3'-phosphate
  modified_base 11: mod_base = OTHER; note = 2'-O-methyladenosine-3'-phosphate
  modified_base 12: mod_base = OTHER; note = 2'-O-methylguanosine-3'-phosphate
  modified_base 13: mod_base = OTHER; note = 2'-O-methyluridine-3'-phosphate
  modified_base 14: mod_base = OTHER; note = 2'-deoxy-2'-fluorocytidine-3'-phosphate
  modified_base 15: mod_base = OTHER; note = 2'-O-methylcytidine-3'-phosphate
  modified_base 16: mod_base = OTHER; note = 2'-deoxy-2'-fluorouridine-3'-phosphate
  modified_base 17: mod_base = OTHER; note = 2'-O-methyluridine-3'-phosphate
  modified_base 18: mod_base = OTHER; note = 2'-O-methyluridine-3'-phosphate
  modified_base 19: mod_base = OTHER; note = 2'-O-methyladenosine-3'-phosphate
  modified_base 20: mod_base = OTHER; note = 2'-O-methyladenosine-3'-phosphate
  modified_base 21: mod_base = OTHER; note = 2'-O-methyluridine-3'-phosphorothioate
  modified_base 22: mod_base = OTHER; note = 2'-O-methylguanosine-3'-phosphorothioate
  modified_base 23: mod_base = OTHER; note = 2'-O-methylcytidine
accttcagtcagtcctttaatgc

SEQ ID NO: 904 - RNA, 23 nt, synthetic construct
  source 1..23: mol_type = other RNA
  modified_base 1: mod_base = OTHER; note = 2'-O-methyluridine-3'-phosphorothioate
  modified_base 2: mod_base = OTHER; note = 2'-deoxy-2'-fluoroguanosine-3'-phosphorothioate
  modified_base 3: mod_base = OTHER; note = 2'-O-methylguanosine-3'-phosphate
  modified_base 4: mod_base = OTHER; note = 2'-O-methyladenosine-3'-phosphate
  modified_base 5: mod_base = OTHER; note = 2'-O-methyladenosine-3'-phosphate
  modified_base 6: mod_base = OTHER; note = 2'-O-methyluridine-3'-phosphate
  modified_base 7: mod_base = OTHER; note = Cytidine-glycol nucleic acid (GNA), S-isomer
  modified_base 8: mod_base = OTHER; note = 2'-O-methylcytidine-3'-phosphate
  modified_base 9: mod_base = OTHER; note = 2'-O-methyladenosine-3'-phosphate
  modified_base 10: mod_base = OTHER; note = 2'-O-methyluridine-3'-phosphate
  modified_base 11: mod_base = OTHER; note = 2'-O-methylguanosine-3'-phosphate
  modified_base 12: mod_base = OTHER; note = 2'-O-methylcytidine-3'-phosphate
  modified_base 13: mod_base = OTHER; note = 2'-O-methyladenosine-3'-phosphate
  modified_base 14: mod_base = OTHER; note = 2'-deoxy-2'-fluoroguanosine-3'-phosphate
  modified_base 15: mod_base = OTHER; note = 2'-O-methylguanosine-3'-phosphate
  modified_base 16: mod_base = OTHER; note = 2'-deoxy-2'-fluorocytidine-3'-phosphate
  modified_base 17: mod_base = OTHER; note = 2'-O-methylcytidine-3'-phosphate
  modified_base 18: mod_base = OTHER; note = 2'-O-methyluridine-3'-phosphate
  modified_base 19: mod_base = OTHER; note = 2'-O-methyluridine-3'-phosphate
  modified_base 20: mod_base = OTHER; note = 2'-O-methylcytidine-3'-phosphate
  modified_base 21: mod_base = OTHER; note = 2'-O-methyladenosine-3'-phosphorothioate
  modified_base 22: mod_base = OTHER; note = 2'-O-methylguanosine-3'-phosphorothioate
  modified_base 23: mod_base = OTHER; note = 2'-O-methyluridine
tggaatccatgcaggccttcagt

SEQ ID NO: 905 - RNA, 23 nt, synthetic construct
  source 1..23: mol_type = other RNA
  modified_base 1: mod_base = OTHER; note = 2'-O-methyladenosine-3'-phosphorothioate
  modified_base 2: mod_base = OTHER; note = 2'-deoxy-2'-fluorouridine-3'-phosphorothioate
  modified_base 3: mod_base = OTHER; note = 2'-O-methylguanosine-3'-phosphate
  modified_base 4: mod_base = OTHER; note = 2'-O-methylguanosine-3'-phosphate
  modified_base 5: mod_base = OTHER; note = 2'-O-methyladenosine-3'-phosphate
  modified_base 6: mod_base = OTHER; note = 2'-O-methyladenosine-3'-phosphate
  modified_base 7: mod_base = OTHER; note = Thymidine-glycol nucleic acid (GNA), S-Isomer
  modified_base 8: mod_base = OTHER; note = 2'-O-methylcytidine-3'-phosphate
  modified_base 9: mod_base = OTHER; note = 2'-O-methylcytidine-3'-phosphate
  modified_base 10: mod_base = OTHER; note = 2'-O-methyladenosine-3'-phosphate
  modified_base 11: mod_base = OTHER; note = 2'-O-methyluridine-3'-phosphate
  modified_base 12: mod_base = OTHER; note = 2'-O-methylguanosine-3'-phosphate
  modified_base 13: mod_base = OTHER; note = 2'-O-methylcytidine-3'-phosphate
  modified_base 14: mod_base = OTHER; note = 2'-deoxy-2'-fluoroadenosine-3'-phosphate
  modified_base 15: mod_base = OTHER; note = 2'-O-methylguanosine-3'-phosphate
  modified_base 16: mod_base = OTHER; note = 2'-deoxy-2'-fluoroguanosine-3'-phosphate
  modified_base 17: mod_base = OTHER; note = 2'-O-methylcytidine-3'-phosphate
  modified_base 18: mod_base = OTHER; note = 2'-O-methylcytidine-3'-phosphate
  modified_base 19: mod_base = OTHER; note = 2'-O-methyluridine-3'-phosphate
  modified_base 20: mod_base = OTHER; note = 2'-O-methyluridine-3'-phosphate
  modified_base 21: mod_base = OTHER; note = 2'-O-methylcytidine-3'-phosphorothioate
  modified_base 22: mod_base = OTHER; note = 2'-O-methyladenosine-3'-phosphorothioate
  modified_base 23: mod_base = OTHER; note = 2'-O-methylguanosine
atggaatccatgcaggccttcag

SEQ ID NO: 906 - RNA, 23 nt, synthetic construct
  source 1..23: mol_type = other RNA
  modified_base 1: mod_base = OTHER; note = 2'-O-methyladenosine-3'-phosphorothioate
  modified_base 2: mod_base = OTHER; note = 2'-deoxy-2'-fluorocytidine-3'-phosphorothioate
  modified_base 3: mod_base = OTHER; note = 2'-O-methyladenosine-3'-phosphate
  modified_base 4: mod_base = OTHER; note = 2'-O-methyluridine-3'-phosphate
  modified_base 5: mod_base = OTHER; note = 2'-O-methylguanosine-3'-phosphate
  modified_base 6: mod_base = OTHER; note = 2'-O-methylguanosine-3'-phosphate
  modified_base 7: mod_base = OTHER; note = Adenosine-glycol nucleic acid (GNA), S-isomer
  modified_base 8: mod_base = OTHER; note = 2'-O-methyladenosine-3'-phosphate
  modified_base 9: mod_base = OTHER; note = 2'-O-methyluridine-3'-phosphate
  modified_base 10: mod_base = OTHER; note = 2'-O-methylcytidine-3'-phosphate
  modified_base 11: mod_base = OTHER; note = 2'-O-methylcytidine-3'-phosphate
  modified_base 12: mod_base = OTHER; note = 2'-O-methyladenosine-3'-phosphate
  modified_base 13: mod_base = OTHER; note = 2'-O-methyluridine-3'-phosphate
  modified_base 14: mod_base = OTHER; note = 2'-deoxy-2'-fluoroguanosine-3'-phosphate
  modified_base 15: mod_base = OTHER; note = 2'-O-methylcytidine-3'-phosphate
  modified_base 16: mod_base = OTHER; note = 2'-deoxy-2'-fluoroadenosine-3'-phosphate
  modified_base 17: mod_base = OTHER; note = 2'-O-methylguanosine-3'-phosphate
  modified_base 18: mod_base = OTHER; note = 2'-O-methylguanosine-3'-phosphate
  modified_base 19: mod_base = OTHER; note = 2'-O-methylcytidine-3'-phosphate
  modified_base 20: mod_base = OTHER; note = 2'-O-methylcytidine-3'-phosphate
  modified_base 21: mod_base = OTHER; note = 2'-O-methyluridine-3'-phosphorothioate
  modified_base 22: mod_base = OTHER; note = 2'-O-methyluridine-3'-phosphorothioate
  modified_base 23: mod_base = OTHER; note = 2'-O-methylcytidine
acatggaatccatgcaggccttc

SEQ ID NO: 907 - RNA, 23 nt, synthetic construct
  source 1..23: mol_type = other RNA
  modified_base 1: mod_base = OTHER; note = 2'-O-methyladenosine-3'-phosphorothioate
  modified_base 2: mod_base = OTHER; note = 2'-deoxy-2'-fluoroadenosine-3'-phosphorothioate
  modified_base 3: mod_base = OTHER; note = 2'-O-methylcytidine-3'-phosphate
  modified_base 4: mod_base = OTHER; note = 2'-O-methyladenosine-3'-phosphate
  modified_base 5: mod_base = OTHER; note = 2'-O-methyluridine-3'-phosphate
  modified_base 6: mod_base = OTHER; note = 2'-O-methylguanosine-3'-phosphate
  modified_base 7: mod_base = OTHER; note = Guanosine-glycol nucleic acid (GNA), S-isomer
  modified_base 8: mod_base = OTHER; note = 2'-O-methyladenosine-3'-phosphate
  modified_base 9: mod_base = OTHER; note = 2'-O-methyladenosine-3'-phosphate
  modified_base 10: mod_base = OTHER; note = 2'-O-methyluridine-3'-phosphate
  modified_base 11: mod_base = OTHER; note = 2'-O-methylcytidine-3'-phosphate
  modified_base 12: mod_base = OTHER; note = 2'-O-methylcytidine-3'-phosphate
  modified_base 13: mod_base = OTHER; note = 2'-O-methyladenosine-3'-phosphate
  modified_base 14: mod_base = OTHER; note = 2'-deoxy-2'-fluorouridine-3'-phosphate
  modified_base 15: mod_base = OTHER; note = 2'-O-methylguanosine-3'-phosphate
  modified_base 16: mod_base = OTHER; note = 2'-deoxy-2'-fluorocytidine-3'-phosphate
  modified_base 17: mod_base = OTHER; note = 2'-O-methyladenosine-3'-phosphate
  modified_base 18: mod_base = OTHER; note = 2'-O-methylguanosine-3'-phosphate
  modified_base 19: mod_base = OTHER; note = 2'-O-methylguanosine-3'-phosphate
  modified_base 20: mod_base = OTHER; note = 2'-O-methylcytidine-3'-phosphate
  modified_base 21: mod_base = OTHER; note = 2'-O-methylcytidine-3'-phosphorothioate
  modified_base 22: mod_base = OTHER; note = 2'-O-methyluridine-3'-phosphorothioate
  modified_base 23: mod_base = OTHER; note = 2'-O-methyluridine
aacatggaatccatgcaggcctt

SEQ ID NO: 908 - RNA, 23 nt, synthetic construct
  source 1..23: mol_type = other RNA
  modified_base 1: mod_base = OTHER; note = 2'-O-methyladenosine-3'-phosphorothioate
  modified_base 2: mod_base = OTHER; note = 2'-deoxy-2'-fluoroadenosine-3'-phosphorothioate
  modified_base 3: mod_base = OTHER; note = 2'-O-methyladenosine-3'-phosphate
  modified_base 4: mod_base = OTHER; note = 2'-O-methylcytidine-3'-phosphate
  modified_base 5: mod_base = OTHER; note = 2'-O-methyladenosine-3'-phosphate
  modified_base 6: mod_base = OTHER; note = 2'-O-methyluridine-3'-phosphate
  modified_base 7: mod_base = OTHER; note = Guanosine-glycol nucleic acid (GNA), S-isomer
  modified_base 8: mod_base = OTHER; note = 2'-O-methylguanosine-3'-phosphate
  modified_base 9: mod_base = OTHER; note = 2'-O-methyladenosine-3'-phosphate
  modified_base 10: mod_base = OTHER; note = 2'-O-methyladenosine-3'-phosphate
  modified_base 11: mod_base = OTHER; note = 2'-O-methyluridine-3'-phosphate
  modified_base 12: mod_base = OTHER; note = 2'-O-methylcytidine-3'-phosphate
  modified_base 13: mod_base = OTHER; note = 2'-O-methylcytidine-3'-phosphate
  modified_base 14: mod_base = OTHER; note = 2'-deoxy-2'-fluoroadenosine-3'-phosphate
  modified_base 15: mod_base = OTHER; note = 2'-O-methyluridine-3'-phosphate
  modified_base 16: mod_base = OTHER; note = 2'-deoxy-2'-fluoroguanosine-3'-phosphate
  modified_base 17: mod_base = OTHER; note = 2'-O-methylcytidine-3'-phosphate
  modified_base 18: mod_base = OTHER; note = 2'-O-methyladenosine-3'-phosphate
  modified_base 19: mod_base = OTHER; note = 2'-O-methylguanosine-3'-phosphate
  modified_base 20: mod_base = OTHER; note = 2'-O-methylguanosine-3'-phosphate
  modified_base 21: mod_base = OTHER; note = 2'-O-methylcytidine-3'-phosphorothioate
  modified_base 22: mod_base = OTHER; note = 2'-O-methylcytidine-3'-phosphorothioate
  modified_base 23: mod_base = OTHER; note = 2'-O-methyluridine
aaacatggaatccatgcaggcct

SEQ ID NO: 909 - RNA, 23 nt, synthetic construct
  source 1..23: mol_type = other RNA
  modified_base 1: mod_base = OTHER; note = 2'-O-methyluridine-3'-phosphorothioate
  modified_base 2: mod_base = OTHER; note = 2'-deoxy-2'-fluoroguanosine-3'-phosphorothioate
  modified_base 3: mod_base = OTHER; note = 2'-O-methyladenosine-3'-phosphate
  modified_base 4: mod_base = OTHER; note = 2'-O-methyladenosine-3'-phosphate
  modified_base 5: mod_base = OTHER; note = 2'-O-methylcytidine-3'-phosphate
  modified_base 6: mod_base = OTHER; note = 2'-O-methyladenosine-3'-phosphate
  modified_base 7: mod_base = OTHER; note = Thymidine-glycol nucleic acid (GNA), S-Isomer
  modified_base 8: mod_base = OTHER; note = 2'-O-methylguanosine-3'-phosphate
  modified_base 9: mod_base = OTHER; note = 2'-O-methylguanosine-3'-phosphate
  modified_base 10: mod_base = OTHER; note = 2'-O-methyladenosine-3'-phosphate
  modified_base 11: mod_base = OTHER; note = 2'-O-methyladenosine-3'-phosphate
  modified_base 12: mod_base = OTHER; note = 2'-O-methyluridine-3'-phosphate
  modified_base 13: mod_base = OTHER; note = 2'-O-methylcytidine-3'-phosphate
  modified_base 14: mod_base = OTHER; note = 2'-deoxy-2'-fluorocytidine-3'-phosphate
  modified_base 15: mod_base = OTHER; note = 2'-O-methyladenosine-3'-phosphate
  modified_base 16: mod_base = OTHER; note = 2'-deoxy-2'-fluorouridine-3'-phosphate
  modified_base 17: mod_base = OTHER; note = 2'-O-methylguanosine-3'-phosphate
  modified_base 18: mod_base = OTHER; note = 2'-O-methylcytidine-3'-phosphate
  modified_base 19: mod_base = OTHER; note = 2'-O-methyladenosine-3'-phosphate
  modified_base 20: mod_base = OTHER; note = 2'-O-methylguanosine-3'-phosphate
  modified_base 21: mod_base = OTHER; note = 2'-O-methylguanosine-3'-phosphorothioate
  modified_base 22: mod_base = OTHER; note = 2'-O-methylcytidine-3'-phosphorothioate
  modified_base 23: mod_base = OTHER; note = 2'-O-methylcytidine
tgaacatggaatccatgcaggcc

SEQ ID NO: 910 - RNA, 23 nt, synthetic construct
  source 1..23: mol_type = other RNA
  modified_base 1: mod_base = OTHER; note = 2'-O-methyladenosine-3'-phosphorothioate
  modified_base 2: mod_base = OTHER; note = 2'-deoxy-2'-fluorouridine-3'-phosphorothioate
  modified_base 3: mod_base = OTHER; note = 2'-O-methylguanosine-3'-phosphate
  modified_base 4: mod_base = OTHER; note = 2'-O-methyladenosine-3'-phosphate
  modified_base 5: mod_base = OTHER; note = 2'-O-methyladenosine-3'-phosphate
  modified_base 6: mod_base = OTHER; note = 2'-O-methylcytidine-3'-phosphate
  modified_base 7: mod_base = OTHER; note = Adenosine-glycol nucleic acid (GNA), S-isomer
  modified_base 8: mod_base = OTHER; note = 2'-O-methyluridine-3'-phosphate
  modified_base 9: mod_base = OTHER; note = 2'-O-methylguanosine-3'-phosphate
  modified_base 10: mod_base = OTHER; note = 2'-O-methylguanosine-3'-phosphate
  modified_base 11: mod_base = OTHER; note = 2'-O-methyladenosine-3'-phosphate
  modified_base 12: mod_base = OTHER; note = 2'-O-methyladenosine-3'-phosphate
  modified_base 13: mod_base = OTHER; note = 2'-O-methyluridine-3'-phosphate
  modified_base 14: mod_base = OTHER; note = 2'-deoxy-2'-fluorocytidine-3'-phosphate
  modified_base 15: mod_base = OTHER; note = 2'-O-methylcytidine-3'-phosphate
  modified_base 16: mod_base = OTHER; note = 2'-deoxy-2'-fluoroadenosine-3'-phosphate
  modified_base 17: mod_base = OTHER; note = 2'-O-methyluridine-3'-phosphate
  modified_base 18: mod_base = OTHER; note = 2'-O-methylguanosine-3'-phosphate
  modified_base 19: mod_base = OTHER; note = 2'-O-methylcytidine-3'-phosphate
  modified_base 20: mod_base = OTHER; note = 2'-O-methyladenosine-3'-phosphate
  modified_base 21: mod_base = OTHER; note = 2'-O-methylguanosine-3'-phosphorothioate
  modified_base 22: mod_base = OTHER; note = 2'-O-methylguanosine-3'-phosphorothioate
  modified_base 23: mod_base = OTHER; note = 2'-O-methylcytidine
atgaacatggaatccatgcaggc

SEQ ID NO: 911 - RNA, 23 nt, synthetic construct
  source 1..23: mol_type = other RNA
  modified_base 1: mod_base = OTHER; note = 2'-O-methyladenosine-3'-phosphorothioate
  modified_base 2: mod_base = OTHER; note = 2'-deoxy-2'-fluoroadenosine-3'-phosphorothioate
  modified_base 3: mod_base = OTHER; note = 2'-O-methyluridine-3'-phosphate
  modified_base 4: mod_base = OTHER; note = 2'-O-methylguanosine-3'-phosphate
  modified_base 5: mod_base = OTHER; note = 2'-O-methyladenosine-3'-phosphate
  modified_base 6: mod_base = OTHER; note = 2'-O-methyladenosine-3'-phosphate
  modified_base 7: mod_base = OTHER; note = Cytidine-glycol nucleic acid (GNA), S-isomer
  modified_base 8: mod_base = OTHER; note = 2'-O-methyladenosine-3'-phosphate
  modified_base 9: mod_base = OTHER; note = 2'-O-methyluridine-3'-phosphate
  modified_base 10: mod_base = OTHER; note = 2'-O-methylguanosine-3'-phosphate
  modified_base 11: mod_base = OTHER; note = 2'-O-methylguanosine-3'-phosphate
  modified_base 12: mod_base = OTHER; note = 2'-O-methyladenosine-3'-phosphate
  modified_base 13: mod_base = OTHER; note = 2'-O-methyladenosine-3'-phosphate
  modified_base 14: mod_base = OTHER; note = 2'-deoxy-2'-fluorouridine-3'-phosphate
  modified_base 15: mod_base = OTHER; note = 2'-O-methylcytidine-3'-phosphate
  modified_base 16: mod_base = OTHER; note = 2'-deoxy-2'-fluorocytidine-3'-phosphate
  modified_base 17: mod_base = OTHER; note = 2'-O-methyladenosine-3'-phosphate
  modified_base 18: mod_base = OTHER; note = 2'-O-methyluridine-3'-phosphate
  modified_base 19: mod_base = OTHER; note = 2'-O-methylguanosine-3'-phosphate
  modified_base 20: mod_base = OTHER; note = 2'-O-methylcytidine-3'-phosphate
  modified_base 21: mod_base = OTHER; note = 2'-O-methyladenosine-3'-phosphorothioate
  modified_base 22: mod_base = OTHER; note = 2'-O-methylguanosine-3'-phosphorothioate
  modified_base 23: mod_base = OTHER; note = 2'-O-methylguanosine
aatgaacatggaatccatgcagg

SEQ ID NO: 912 - RNA, 23 nt, synthetic construct
  source 1..23: mol_type = other RNA
  modified_base 1: mod_base = OTHER; note = 2'-O-methyladenosine-3'-phosphorothioate
  modified_base 2: mod_base = OTHER; note = 2'-deoxy-2'-fluorouridine-3'-phosphorothioate
  modified_base 3: mod_base = OTHER; note = 2'-O-methylcytidine-3'-phosphate
  modified_base 4: mod_base = OTHER; note = 2'-O-methyluridine-3'-phosphate
  modified_base 5: mod_base = OTHER; note = 2'-O-methylcytidine-3'-phosphate
  modified_base 6: mod_base = OTHER; note = 2'-O-methylcytidine-3'-phosphate
  modified_base 7: mod_base = OTHER; note = Adenosine-glycol nucleic acid (GNA), S-isomer
  modified_base 8: mod_base = OTHER; note = 2'-O-methyladenosine-3'-phosphate
  modified_base 9: mod_base = OTHER; note = 2'-O-methyladenosine-3'-phosphate
  modified_base 10: mod_base = OTHER; note = 2'-O-methylcytidine-3'-phosphate
  modified_base 11: mod_base = OTHER; note = 2'-O-methyluridine-3'-phosphate
  modified_base 12: mod_base = OTHER; note = 2'-O-methylcytidine-3'-phosphate
  modified_base 13: mod_base = OTHER; note = 2'-O-methyladenosine-3'-phosphate
  modified_base 14: mod_base = OTHER; note = 2'-deoxy-2'-fluorouridine-3'-phosphate
  modified_base 15: mod_base = OTHER; note = 2'-O-methylguanosine-3'-phosphate
  modified_base 16: mod_base = OTHER; note = 2'-deoxy-2'-fluoroadenosine-3'-phosphate
  modified_base 17: mod_base = OTHER; note = 2'-O-methyladenosine-3'-phosphate
  modified_base 18: mod_base = OTHER; note = 2'-O-methylcytidine-3'-phosphate
  modified_base 19: mod_base = OTHER; note = 2'-O-methyladenosine-3'-phosphate
  modified_base 20: mod_base = OTHER; note = 2'-O-methyluridine-3'-phosphate
  modified_base 21: mod_base = OTHER; note = 2'-O-methylguanosine-3'-phosphorothioate
  modified_base 22: mod_base = OTHER; note = 2'-O-methylguanosine-3'-phosphorothioate
  modified_base 23: mod_base = OTHER; note = 2'-O-methyladenosine
atctccaaactcatgaacatgga

SEQ ID NO: 913 - RNA, 23 nt, synthetic construct
  source 1..23: mol_type = other RNA
  modified_base 1: mod_base = OTHER; note = 2'-O-methyladenosine-3'-phosphorothioate
  modified_base 2: mod_base = OTHER; note = 2'-deoxy-2'-fluorouridine-3'-phosphorothioate
  modified_base 3: mod_base = OTHER; note = 2'-O-methyluridine-3'-phosphate
  modified_base 4: mod_base = OTHER; note = 2'-O-methyladenosine-3'-phosphate
  modified_base 5: mod_base = OTHER; note = 2'-O-methyluridine-3'-phosphate
  modified_base 6: mod_base = OTHER; note = 2'-O-methylcytidine-3'-phosphate
  modified_base 7: mod_base = OTHER; note = Thymidine-glycol nucleic acid (GNA), S-Isomer
  modified_base 8: mod_base = OTHER; note = 2'-O-methylcytidine-3'-phosphate
  modified_base 9: mod_base = OTHER; note = 2'-O-methylcytidine-3'-phosphate
  modified_base 10: mod_base = OTHER; note = 2'-O-methyladenosine-3'-phosphate
  modified_base 11: mod_base = OTHER; note = 2'-O-methyladenosine-3'-phosphate
  modified_base 12: mod_base = OTHER; note = 2'-O-methyladenosine-3'-phosphate
  modified_base 13: mod_base = OTHER; note = 2'-O-methylcytidine-3'-phosphate
  modified_base 14: mod_base = OTHER; note = 2'-deoxy-2'-fluorouridine-3'-phosphate
  modified_base 15: mod_base = OTHER; note = 2'-O-methylcytidine-3'-phosphate
  modified_base 16: mod_base = OTHER; note = 2'-deoxy-2'-fluoroadenosine-3'-phosphate
  modified_base 17: mod_base = OTHER; note = 2'-O-methyluridine-3'-phosphate
  modified_base 18: mod_base = OTHER; note = 2'-O-methylguanosine-3'-phosphate
  modified_base 19: mod_base = OTHER; note = 2'-O-methyladenosine-3'-phosphate
  modified_base 20: mod_base = OTHER; note = 2'-O-methyladenosine-3'-phosphate
  modified_base 21: mod_base = OTHER; note = 2'-O-methylcytidine-3'-phosphorothioate
  modified_base 22: mod_base = OTHER; note = 2'-O-methyladenosine-3'-phosphorothioate
  modified_base 23: mod_base = OTHER; note = 2'-O-methyluridine
attatctccaaactcatgaacat

SEQ ID NO: 914 - RNA, 23 nt, synthetic construct
  source 1..23: mol_type = other RNA
  modified_base 1: mod_base = OTHER; note = 2'-O-methyluridine-3'-phosphorothioate
  modified_base 2: mod_base = OTHER; note = 2'-deoxy-2'-fluoroadenosine-3'-phosphorothioate
  modified_base 3: mod_base = OTHER; note = 2'-O-methyluridine-3'-phosphate
  modified_base 4: mod_base = OTHER; note = 2'-O-methyluridine-3'-phosphate
  modified_base 5: mod_base = OTHER; note = 2'-O-methyladenosine-3'-phosphate
  modified_base 6: mod_base = OTHER; note = 2'-O-methyluridine-3'-phosphate
  modified_base 7: mod_base = OTHER; note = Cytidine-glycol nucleic acid (GNA), S-isomer
  modified_base 8: mod_base = OTHER; note = 2'-O-methyluridine-3'-phosphate
  modified_base 9: mod_base = OTHER; note = 2'-O-methylcytidine-3'-phosphate
  modified_base 10: mod_base = OTHER; note = 2'-O-methylcytidine-3'-phosphate
  modified_base 11: mod_base = OTHER; note = 2'-O-methyladenosine-3'-phosphate
  modified_base 12: mod_base = OTHER; note = 2'-O-methyladenosine-3'-phosphate
  modified_base 13: mod_base = OTHER; note = 2'-O-methyladenosine-3'-phosphate
  modified_base 14: mod_base = OTHER; note = 2'-deoxy-2'-fluorocytidine-3'-phosphate
  modified_base 15: mod_base = OTHER; note = 2'-O-methyluridine-3'-phosphate
  modified_base 16: mod_base = OTHER; note = 2'-deoxy-2'-fluorocytidine-3'-phosphate
  modified_base 17: mod_base = OTHER; note = 2'-O-methyladenosine-3'-phosphate
  modified_base 18: mod_base = OTHER; note = 2'-O-methyluridine-3'-phosphate
  modified_base 19: mod_base = OTHER; note = 2'-O-methylguanosine-3'-phosphate
  modified_base 20: mod_base = OTHER; note = 2'-O-methyladenosine-3'-phosphate
  modified_base 21: mod_base = OTHER; note = 2'-O-methyladenosine-3'-phosphorothioate
  modified_base 22: mod_base = OTHER; note = 2'-O-methylcytidine-3'-phosphorothioate
  modified_base 23: mod_base = OTHER; note = 2'-O-methyladenosine
tattatctccaaactcatgaaca

SEQ ID NO: 915 - RNA, 23 nt, synthetic construct
  source 1..23: mol_type = other RNA
  modified_base 1: mod_base = OTHER; note = 2'-O-methyladenosine-3'-phosphorothioate
  modified_base 2: mod_base = OTHER; note = 2'-deoxy-2'-fluorouridine-3'-phosphorothioate
  modified_base 3: mod_base = OTHER; note = 2'-O-methylguanosine-3'-phosphate
  modified_base 4: mod_base = OTHER; note = 2'-O-methyluridine-3'-phosphate
  modified_base 5: mod_base = OTHER; note = 2'-O-methyladenosine-3'-phosphate
  modified_base 6: mod_base = OTHER; note = 2'-O-methyluridine-3'-phosphate
  modified_base 7: mod_base = OTHER; note = Thymidine-glycol nucleic acid (GNA), S-Isomer
  modified_base 8: mod_base = OTHER; note = 2'-O-methyladenosine-3'-phosphate
  modified_base 9: mod_base = OTHER; note = 2'-O-methyluridine-3'-phosphate
  modified_base 10: mod_base = OTHER; note = 2'-O-methylcytidine-3'-phosphate
  modified_base 11: mod_base = OTHER; note = 2'-O-methyluridine-3'-phosphate
  modified_base 12: mod_base = OTHER; note = 2'-O-methylcytidine-3'-phosphate
  modified_base 13: mod_base = OTHER; note = 2'-O-methylcytidine-3'-phosphate
  modified_base 14: mod_base = OTHER; note = 2'-deoxy-2'-fluoroadenosine-3'-phosphate
  modified_base 15: mod_base = OTHER; note = 2'-O-methyladenosine-3'-phosphate
  modified_base 16: mod_base = OTHER; note = 2'-deoxy-2'-fluoroadenosine-3'-phosphate
  modified_base 17: mod_base = OTHER; note = 2'-O-methylcytidine-3'-phosphate
  modified_base 18: mod_base = OTHER; note = 2'-O-methyluridine-3'-phosphate
  modified_base 19: mod_base = OTHER; note = 2'-O-methylcytidine-3'-phosphate
  modified_base 20: mod_base = OTHER; note = 2'-O-methyladenosine-3'-phosphate
  modified_base 21: mod_base = OTHER; note = 2'-O-methyluridine-3'-phosphorothioate
  modified_base 22: mod_base = OTHER; note = 2'-O-methylguanosine-3'-phosphorothioate
  modified_base 23: mod_base = OTHER; note = 2'-O-methyladenosine
atgtattatctccaaactcatga

SEQ ID NO: 916 - RNA, 23 nt, synthetic construct
  source 1..23: mol_type = other RNA
  modified_base 1: mod_base = OTHER; note = 2'-O-methyladenosine-3'-phosphorothioate
  modified_base 2: mod_base = OTHER; note = 2'-deoxy-2'-fluoroadenosine-3'-phosphorothioate
  modified_base 3: mod_base = OTHER; note = 2'-O-methyladenosine-3'-phosphate
  modified_base 4: mod_base = OTHER; note = 2'-O-methylguanosine-3'-phosphate
  modified_base 5: mod_base = OTHER; note = 2'-O-methyluridine-3'-phosphate
  modified_base 6: mod_base = OTHER; note = 2'-O-methylguanosine-3'-phosphate
  modified_base 7: mod_base = OTHER; note = Adenosine-glycol nucleic acid (GNA), S-isomer
  modified_base 8: mod_base = OTHER; note = 2'-O-methylguanosine-3'-phosphate
  modified_base 9: mod_base = OTHER; note = 2'-O-methylguanosine-3'-phosphate
  modified_base 10: mod_base = OTHER; note = 2'-O-methyladenosine-3'-phosphate
  modified_base 11: mod_base = OTHER; note = 2'-O-methylcytidine-3'-phosphate
  modified_base 12: mod_base = OTHER; note = 2'-O-methylcytidine-3'-phosphate
  modified_base 13: mod_base = OTHER; note = 2'-O-methyluridine-3'-phosphate
  modified_base 14: mod_base = OTHER; note = 2'-deoxy-2'-fluoroguanosine-3'-phosphate
  modified_base 15: mod_base = OTHER; note = 2'-O-methylcytidine-3'-phosphate
  modified_base 16: mod_base = OTHER; note = 2'-deoxy-2'-fluoroadenosine-3'-phosphate
  modified_base 17: mod_base = OTHER; note = 2'-O-methylcytidine-3'-phosphate
  modified_base 18: mod_base = OTHER; note = 2'-O-methyluridine-3'-phosphate
  modified_base 19: mod_base = OTHER; note = 2'-O-methylguanosine-3'-phosphate
  modified_base 20: mod_base = OTHER; note = 2'-O-methylguanosine-3'-phosphate
  modified_base 21: mod_base = OTHER; note = 2'-O-methyluridine-3'-phosphorothioate
  modified_base 22: mod_base = OTHER; note = 2'-O-methyladenosine-3'-phosphorothioate
  modified_base 23: mod_base = OTHER; note = 2'-O-methylcytidine
aaagtgaggacctgcactggtac

SEQ ID NO: 917 - RNA, 23 nt, synthetic construct
  source 1..23: mol_type = other RNA
  modified_base 1: mod_base = OTHER; note = 2'-O-methyluridine-3'-phosphorothioate
  modified_base 2: mod_base = OTHER; note = 2'-deoxy-2'-fluoroadenosine-3'-phosphorothioate
  modified_base 3: mod_base = OTHER; note = 2'-O-methyladenosine-3'-phosphate
  modified_base 4: mod_base = OTHER; note = 2'-O-methyladenosine-3'-phosphate
  modified_base 5: mod_base = OTHER; note = 2'-O-methylguanosine-3'-phosphate
  modified_base 6: mod_base = OTHER; note = 2'-O-methyluridine-3'-phosphate
  modified_base 7: mod_base = OTHER; note = Guanosine-glycol nucleic acid (GNA), S-isomer
  modified_base 8: mod_base = OTHER; note = 2'-O-methyladenosine-3'-phosphate
  modified_base 9: mod_base = OTHER; note = 2'-O-methylguanosine-3'-phosphate
  modified_base 10: mod_base = OTHER; note = 2'-O-methylguanosine-3'-phosphate
  modified_base 11: mod_base = OTHER; note = 2'-O-methyladenosine-3'-phosphate
  modified_base 12: mod_base = OTHER; note = 2'-O-methylcytidine-3'-phosphate
  modified_base 13: mod_base = OTHER; note = 2'-O-methylcytidine-3'-phosphate
  modified_base 14: mod_base = OTHER; note = 2'-deoxy-2'-fluorouridine-3'-phosphate
  modified_base 15: mod_base = OTHER; note = 2'-O-methylguanosine-3'-phosphate
  modified_base 16: mod_base = OTHER; note = 2'-deoxy-2'-fluorocytidine-3'-phosphate
  modified_base 17: mod_base = OTHER; note = 2'-O-methyladenosine-3'-phosphate
  modified_base 18: mod_base = OTHER; note = 2'-O-methylcytidine-3'-phosphate
  modified_base 19: mod_base = OTHER; note = 2'-O-methyluridine-3'-phosphate
  modified_base 20: mod_base = OTHER; note = 2'-O-methylguanosine-3'-phosphate
  modified_base 21: mod_base = OTHER; note = 2'-O-methylguanosine-3'-phosphorothioate
  modified_base 22: mod_base = OTHER; note = 2'-O-methyluridine-3'-phosphorothioate
  modified_base 23: mod_base = OTHER; note = 2'-O-methyladenosine
taaagtgaggacctgcactggta

SEQ ID NO: 918 - RNA, 23 nt, synthetic construct
  source 1..23: mol_type = other RNA
  modified_base 1: mod_base = OTHER; note = 2'-O-methyluridine-3'-phosphorothioate
  modified_base 2: mod_base = OTHER; note = 2'-deoxy-2'-fluorouridine-3'-phosphorothioate
  modified_base 3: mod_base = OTHER; note = 2'-O-methyladenosine-3'-phosphate
  modified_base 4: mod_base = OTHER; note = 2'-O-methyladenosine-3'-phosphate
  modified_base 5: mod_base = OTHER; note = 2'-O-methyladenosine-3'-phosphate
  modified_base 6: mod_base = OTHER; note = 2'-O-methylguanosine-3'-phosphate
  modified_base 7: mod_base = OTHER; note = Thymidine-glycol nucleic acid (GNA), S-Isomer
  modified_base 8: mod_base = OTHER; note = 2'-O-methylguanosine-3'-phosphate
  modified_base 9: mod_base = OTHER; note = 2'-O-methyladenosine-3'-phosphate
  modified_base 10: mod_base = OTHER; note = 2'-O-methylguanosine-3'-phosphate
  modified_base 11: mod_base = OTHER; note = 2'-O-methylguanosine-3'-phosphate
  modified_base 12: mod_base = OTHER; note = 2'-O-methyladenosine-3'-phosphate
  modified_base 13: mod_base = OTHER; note = 2'-O-methylcytidine-3'-phosphate
  modified_base 14: mod_base = OTHER; note = 2'-deoxy-2'-fluorocytidine-3'-phosphate
  modified_base 15: mod_base = OTHER; note = 2'-O-methyluridine-3'-phosphate
  modified_base 16: mod_base = OTHER; note = 2'-deoxy-2'-fluoroguanosine-3'-phosphate
  modified_base 17: mod_base = OTHER; note = 2'-O-methylcytidine-3'-phosphate
  modified_base 18: mod_base = OTHER; note = 2'-O-methyladenosine-3'-phosphate
  modified_base 19: mod_base = OTHER; note = 2'-O-methylcytidine-3'-phosphate
  modified_base 20: mod_base = OTHER; note = 2'-O-methyluridine-3'-phosphate
  modified_base 21: mod_base = OTHER; note = 2'-O-methylguanosine-3'-phosphorothioate
  modified_base 22: mod_base = OTHER; note = 2'-O-methylguanosine-3'-phosphorothioate
  modified_base 23: mod_base = OTHER; note = 2'-O-methyluridine
ttaaagtgaggacctgcactggt

SEQ ID NO: 919 - RNA, 23 nt, synthetic construct
  source 1..23: mol_type = other RNA
  modified_base 1: mod_base = OTHER; note = 2'-O-methyladenosine-3'-phosphorothioate
  modified_base 2: mod_base = OTHER; note = 2'-deoxy-2'-fluoroadenosine-3'-phosphorothioate
  modified_base 3: mod_base = OTHER; note = 2'-O-methyluridine-3'-phosphate
  modified_base 4: mod_base = OTHER; note = 2'-O-methyluridine-3'-phosphate
  modified_base 5: mod_base = OTHER; note = 2'-O-methyladenosine-3'-phosphate
  modified_base 6: mod_base = OTHER; note = 2'-O-methyladenosine-3'-phosphate
  modified_base 7: mod_base = OTHER; note = Adenosine-glycol nucleic acid (GNA), S-isomer
  modified_base 8: mod_base = OTHER; note = 2'-O-methylguanosine-3'-phosphate
  modified_base 9: mod_base = OTHER; note = 2'-O-methyluridine-3'-phosphate
  modified_base 10: mod_base = OTHER; note = 2'-O-methylguanosine-3'-phosphate
  modified_base 11: mod_base = OTHER; note = 2'-O-methyladenosine-3'-phosphate
  modified_base 12: mod_base = OTHER; note = 2'-O-methylguanosine-3'-phosphate
  modified_base 13: mod_base = OTHER; note = 2'-O-methylguanosine-3'-phosphate
  modified_base 14: mod_base = OTHER; note = 2'-deoxy-2'-fluoroadenosine-3'-phosphate
  modified_base 15: mod_base = OTHER; note = 2'-O-methylcytidine-3'-phosphate
  modified_base 16: mod_base = OTHER; note = 2'-deoxy-2'-fluorocytidine-3'-phosphate
  modified_base 17: mod_base = OTHER; note = 2'-O-methyluridine-3'-phosphate
  modified_base 18: mod_base = OTHER; note = 2'-O-methylguanosine-3'-phosphate
  modified_base 19: mod_base = OTHER; note = 2'-O-methylcytidine-3'-phosphate
  modified_base 20: mod_base = OTHER; note = 2'-O-methyladenosine-3'-phosphate
  modified_base 21: mod_base = OTHER; note = 2'-O-methylcytidine-3'-phosphorothioate
  modified_base 22: mod_base = OTHER; note = 2'-O-methyluridine-3'-phosphorothioate
  modified_base 23: mod_base = OTHER; note = 2'-O-methylguanosine
aattaaagtgaggacctgcactg

SEQ ID NO: 920 - RNA, 23 nt, synthetic construct
  source 1..23: mol_type = other RNA
  modified_base 1: mod_base = OTHER; note = 2'-O-methyladenosine-3'-phosphorothioate
  modified_base 2: mod_base = OTHER; note = 2'-deoxy-2'-fluoroguanosine-3'-phosphorothioate
  modified_base 3: mod_base = OTHER; note = 2'-O-methyladenosine-3'-phosphate
  modified_base 4: mod_base = OTHER; note = 2'-O-methyluridine-3'-phosphate
  modified_base 5: mod_base = OTHER; note = 2'-O-methyluridine-3'-phosphate
  modified_base 6: mod_base = OTHER; note = 2'-O-methyladenosine-3'-phosphate
  modified_base 7: mod_base = OTHER; note = Adenosine-glycol nucleic acid (GNA), S-isomer
  modified_base 8: mod_base = OTHER; note = 2'-O-methyladenosine-3'-phosphate
  modified_base 9: mod_base = OTHER; note = 2'-O-methylguanosine-3'-phosphate
  modified_base 10: mod_base = OTHER; note = 2'-O-methyluridine-3'-phosphate
  modified_base 11: mod_base = OTHER; note = 2'-O-methylguanosine-3'-phosphate
  modified_base 12: mod_base = OTHER; note = 2'-O-methyladenosine-3'-phosphate
  modified_base 13: mod_base = OTHER; note = 2'-O-methylguanosine-3'-phosphate
  modified_base 14: mod_base = OTHER; note = 2'-deoxy-2'-fluoroguanosine-3'-phosphate
  modified_base 15: mod_base = OTHER; note = 2'-O-methyladenosine-3'-phosphate
  modified_base 16: mod_base = OTHER; note = 2'-deoxy-2'-fluorocytidine-3'-phosphate
  modified_base 17: mod_base = OTHER; note = 2'-O-methylcytidine-3'-phosphate
  modified_base 18: mod_base = OTHER; note = 2'-O-methyluridine-3'-phosphate
  modified_base 19: mod_base = OTHER; note = 2'-O-methylguanosine-3'-phosphate
  modified_base 20: mod_base = OTHER; note = 2'-O-methylcytidine-3'-phosphate
  modified_base 21: mod_base = OTHER; note = 2'-O-methyladenosine-3'-phosphorothioate
  modified_base 22: mod_base = OTHER; note = 2'-O-methylcytidine-3'-phosphorothioate
  modified_base 23: mod_base = OTHER; note = 2'-O-methyluridine
agattaaagtgaggacctgcact

SEQ ID NO: 921 - RNA, 23 nt, synthetic construct
  source 1..23: mol_type = other RNA
  modified_base 1: mod_base = OTHER; note = 2'-O-methyladenosine-3'-phosphorothioate
  modified_base 2: mod_base = OTHER; note = 2'-deoxy-2'-fluoroguanosine-3'-phosphorothioate
  modified_base 3: mod_base = OTHER; note = 2'-O-methylguanosine-3'-phosphate
  modified_base 4: mod_base = OTHER; note = 2'-O-methyladenosine-3'-phosphate
  modified_base 5: mod_base = OTHER; note = 2'-O-methyluridine-3'-phosphate
  modified_base 6: mod_base = OTHER; note = 2'-O-methyluridine-3'-phosphate
  modified_base 7: mod_base = OTHER; note = Adenosine-glycol nucleic acid (GNA), S-isomer
  modified_base 8: mod_base = OTHER; note = 2'-O-methyladenosine-3'-phosphate
  modified_base 9: mod_base = OTHER; note = 2'-O-methyladenosine-3'-phosphate
  modified_base 10: mod_base = OTHER; note = 2'-O-methylguanosine-3'-phosphate
  modified_base 11: mod_base = OTHER; note = 2'-O-methyluridine-3'-phosphate
  modified_base 12: mod_base = OTHER; note = 2'-O-methylguanosine-3'-phosphate
  modified_base 13: mod_base = OTHER; note = 2'-O-methyladenosine-3'-phosphate
  modified_base 14: mod_base = OTHER; note = 2'-deoxy-2'-fluoroguanosine-3'-phosphate
  modified_base 15: mod_base = OTHER; note = 2'-O-methylguanosine-3'-phosphate
  modified_base 16: mod_base = OTHER; note = 2'-deoxy-2'-fluoroadenosine-3'-phosphate
  modified_base 17: mod_base = OTHER; note = 2'-O-methylcytidine-3'-phosphate
  modified_base 18: mod_base = OTHER; note = 2'-O-methylcytidine-3'-phosphate
  modified_base 19: mod_base = OTHER; note = 2'-O-methyluridine-3'-phosphate
  modified_base 20: mod_base = OTHER; note = 2'-O-methylguanosine-3'-phosphate
  modified_base 21: mod_base = OTHER; note = 2'-O-methylcytidine-3'-phosphorothioate
  modified_base 22: mod_base = OTHER; note = 2'-O-methyladenosine-3'-phosphorothioate
  modified_base 23: mod_base = OTHER; note = 2'-O-methylcytidine
aggattaaagtgaggacctgcac

SEQ ID NO: 922 - RNA, 23 nt, synthetic construct
  source 1..23: mol_type = other RNA
  modified_base 1: mod_base = OTHER; note = 2'-O-methyluridine-3'-phosphorothioate
  modified_base 2: mod_base = OTHER; note = 2'-deoxy-2'-fluoroguanosine-3'-phosphorothioate
  modified_base 3: mod_base = OTHER; note = 2'-O-methylguanosine-3'-phosphate
  modified_base 4: mod_base = OTHER; note = 2'-O-methyladenosine-3'-phosphate
  modified_base 5: mod_base = OTHER; note = 2'-O-methyluridine-3'-phosphate
  modified_base 6: mod_base = OTHER; note = 2'-O-methyladenosine-3'-phosphate
  modified_base 7: mod_base = OTHER; note = Guanosine-glycol nucleic acid (GNA), S-isomer
  modified_base 8: mod_base = OTHER; note = 2'-O-methyladenosine-3'-phosphate
  modified_base 9: mod_base = OTHER; note = 2'-O-methylguanosine-3'-phosphate
  modified_base 10: mod_base = OTHER; note = 2'-O-methylguanosine-3'-phosphate
  modified_base 11: mod_base = OTHER; note = 2'-O-methyladenosine-3'-phosphate
  modified_base 12: mod_base = OTHER; note = 2'-O-methyluridine-3'-phosphate
  modified_base 13: mod_base = OTHER; note = 2'-O-methyluridine-3'-phosphate
  modified_base 14: mod_base = OTHER; note = 2'-deoxy-2'-fluoroadenosine-3'-phosphate
  modified_base 15: mod_base = OTHER; note = 2'-O-methyladenosine-3'-phosphate
  modified_base 16: mod_base = OTHER; note = 2'-deoxy-2'-fluoroadenosine-3'-phosphate
  modified_base 17: mod_base = OTHER; note = 2'-O-methylguanosine-3'-phosphate
  modified_base 18: mod_base = OTHER; note = 2'-O-methyluridine-3'-phosphate
  modified_base 19: mod_base = OTHER; note = 2'-O-methylguanosine-3'-phosphate
  modified_base 20: mod_base = OTHER; note = 2'-O-methyladenosine-3'-phosphate
  modified_base 21: mod_base = OTHER; note = 2'-O-methylguanosine-3'-phosphorothioate
  modified_base 22: mod_base = OTHER; note = 2'-O-methylguanosine-3'-phosphorothioate
  modified_base 23: mod_base = OTHER; note = 2'-O-methyladenosine
tggatagaggattaaagtgagga

SEQ ID NO: 923 - RNA, 23 nt, synthetic construct
  source 1..23: mol_type = other RNA
  modified_base 1: mod_base = OTHER; note = 2'-O-methyladenosine-3'-phosphorothioate
  modified_base 2: mod_base = OTHER; note = 2'-deoxy-2'-fluorouridine-3'-phosphorothioate
  modified_base 3: mod_base = OTHER; note = 2'-O-methylguanosine-3'-phosphate
  modified_base 4: mod_base = OTHER; note = 2'-O-methylguanosine-3'-phosphate
  modified_base 5: mod_base = OTHER; note = 2'-O-methyladenosine-3'-phosphate
  modified_base 6: mod_base = OTHER; note = 2'-O-methyluridine-3'-phosphate
  modified_base 7: mod_base = OTHER; note = Adenosine-glycol nucleic acid (GNA), S-isomer
  modified_base 8: mod_base = OTHER; note = 2'-O-methylguanosine-3'-phosphate
  modified_base 9: mod_base = OTHER; note = 2'-O-methyladenosine-3'-phosphate
  modified_base 10: mod_base = OTHER; note = 2'-O-methylguanosine-3'-phosphate
  modified_base 11: mod_base = OTHER; note = 2'-O-methylguanosine-3'-phosphate
  modified_base 12: mod_base = OTHER; note = 2'-O-methyladenosine-3'-phosphate
  modified_base 13: mod_base = OTHER; note = 2'-O-methyluridine-3'-phosphate
  modified_base 14: mod_base = OTHER; note = 2'-deoxy-2'-fluorouridine-3'-phosphate
  modified_base 15: mod_base = OTHER; note = 2'-O-methyladenosine-3'-phosphate
  modified_base 16: mod_base = OTHER; note = 2'-deoxy-2'-fluoroadenosine-3'-phosphate
  modified_base 17: mod_base = OTHER; note = 2'-O-methyladenosine-3'-phosphate
  modified_base 18: mod_base = OTHER; note = 2'-O-methylguanosine-3'-phosphate
  modified_base 19: mod_base = OTHER; note = 2'-O-methyluridine-3'-phosphate
  modified_base 20: mod_base = OTHER; note = 2'-O-methylguanosine-3'-phosphate
  modified_base 21: mod_base = OTHER; note = 2'-O-methyladenosine-3'-phosphorothioate
  modified_base 22: mod_base = OTHER; note = 2'-O-methylguanosine-3'-phosphorothioate
  modified_base 23: mod_base = OTHER; note = 2'-O-methylguanosine
atggatagaggattaaagtgagg

SEQ ID NO: 924 - RNA, 23 nt, synthetic construct
  source 1..23: mol_type = other RNA
  modified_base 1: mod_base = OTHER; note = 2'-O-methyluridine-3'-phosphorothioate
  modified_base 2: mod_base = OTHER; note = 2'-deoxy-2'-fluorocytidine-3'-phosphorothioate
  modified_base 3: mod_base = OTHER; note = 2'-O-methyluridine-3'-phosphate
  modified_base 4: mod_base = OTHER; note = 2'-O-methylguanosine-3'-phosphate
  modified_base 5: mod_base = OTHER; note = 2'-O-methylguanosine-3'-phosphate
  modified_base 6: mod_base = OTHER; note = 2'-O-methyladenosine-3'-phosphate
  modified_base 7: mod_base = OTHER; note = Thymidine-glycol nucleic acid (GNA), S-Isomer
  modified_base 8: mod_base = OTHER; note = 2'-O-methyladenosine-3'-phosphate
  modified_base 9: mod_base = OTHER; note = 2'-O-methylguanosine-3'-phosphate
  modified_base 10: mod_base = OTHER; note = 2'-O-methyladenosine-3'-phosphate
  modified_base 11: mod_base = OTHER; note = 2'-O-methylguanosine-3'-phosphate
  modified_base 12: mod_base = OTHER; note = 2'-O-methylguanosine-3'-phosphate
  modified_base 13: mod_base = OTHER; note = 2'-O-methyladenosine-3'-phosphate
  modified_base 14: mod_base = OTHER; note = 2'-deoxy-2'-fluorouridine-3'-phosphate
  modified_base 15: mod_base = OTHER; note = 2'-O-methyluridine-3'-phosphate
  modified_base 16: mod_base = OTHER; note = 2'-deoxy-2'-fluoroadenosine-3'-phosphate
  modified_base 17: mod_base = OTHER; note = 2'-O-methyladenosine-3'-phosphate
  modified_base 18: mod_base = OTHER; note = 2'-O-methyladenosine-3'-phosphate
  modified_base 19: mod_base = OTHER; note = 2'-O-methylguanosine-3'-phosphate
  modified_base 20: mod_base = OTHER; note = 2'-O-methyluridine-3'-phosphate
  modified_base 21: mod_base = OTHER; note = 2'-O-methylguanosine-3'-phosphorothioate
  modified_base 22: mod_base = OTHER; note = 2'-O-methyladenosine-3'-phosphorothioate
  modified_base 23: mod_base = OTHER; note = 2'-O-methylguanosine
tctggatagaggattaaagtgag

SEQ ID NO: 925 - RNA, 23 nt, synthetic construct
  source 1..23: mol_type = other RNA
  modified_base 1: mod_base = OTHER; note = 2'-O-methyladenosine-3'-phosphorothioate
  modified_base 2: mod_base = OTHER; note = 2'-deoxy-2'-fluorouridine-3'-phosphorothioate
  modified_base 3: mod_base = OTHER; note = 2'-O-methyluridine-3'-phosphate
  modified_base 4: mod_base = OTHER; note = 2'-O-methylcytidine-3'-phosphate
  modified_base 5: mod_base = OTHER; note = 2'-O-methyladenosine-3'-phosphate
  modified_base 6: mod_base = OTHER; note = 2'-O-methyluridine-3'-phosphate
  modified_base 7: mod_base = OTHER; note = Cytidine-glycol nucleic acid (GNA), S-isomer
  modified_base 8: mod_base = OTHER; note = 2'-O-methylcytidine-3'-phosphate
  modified_base 9: mod_base = OTHER; note = 2'-O-methyluridine-3'-phosphate
  modified_base 10: mod_base = OTHER; note = 2'-O-methyluridine-3'-phosphate
  modified_base 11: mod_base = OTHER; note = 2'-O-methyluridine-3'-phosphate
  modified_base 12: mod_base = OTHER; note = 2'-O-methylguanosine-3'-phosphate
  modified_base 13: mod_base = OTHER; note = 2'-O-methylguanosine-3'-phosphate
  modified_base 14: mod_base = OTHER; note = 2'-deoxy-2'-fluorocytidine-3'-phosphate
  modified_base 15: mod_base = OTHER; note = 2'-O-methylcytidine-3'-phosphate
  modified_base 16: mod_base = OTHER; note = 2'-deoxy-2'-fluorocytidine-3'-phosphate
  modified_base 17: mod_base = OTHER; note = 2'-O-methyladenosine-3'-phosphate
  modified_base 18: mod_base = OTHER; note = 2'-O-methylcytidine-3'-phosphate
  modified_base 19: mod_base = OTHER; note = 2'-O-methylcytidine-3'-phosphate
  modified_base 20: mod_base = OTHER; note = 2'-O-methylguanosine-3'-phosphate
  modified_base 21: mod_base = OTHER; note = 2'-O-methyluridine-3'-phosphorothioate
  modified_base 22: mod_base = OTHER; note = 2'-O-methylguanosine-3'-phosphorothioate
  modified_base 23: mod_base = OTHER; note = 2'-O-methyluridine
attcatcctttggcccaccgtgt

SEQ ID NO: 926 - RNA, 23 nt, synthetic construct
  source 1..23: mol_type = other RNA
  modified_base 1: mod_base = OTHER; note = 2'-O-methyladenosine-3'-phosphorothioate
  modified_base 2: mod_base = OTHER; note = 2'-deoxy-2'-fluorouridine-3'-phosphorothioate
  modified_base 3: mod_base = OTHER; note = 2'-O-methylcytidine-3'-phosphate
  modified_base 4: mod_base = OTHER; note = 2'-O-methyluridine-3'-phosphate
  modified_base 5: mod_base = OTHER; note = 2'-O-methyluridine-3'-phosphate
  modified_base 6: mod_base = OTHER; note = 2'-O-methylcytidine-3'-phosphate
  modified_base 7: mod_base = OTHER; note = Adenosine-glycol nucleic acid (GNA), S-isomer
  modified_base 8: mod_base = OTHER; note = 2'-O-methyluridine-3'-phosphate
  modified_base 9: mod_base = OTHER; note = 2'-O-methylcytidine-3'-phosphate
  modified_base 10: mod_base = OTHER; note = 2'-O-methylcytidine-3'-phosphate
  modified_base 11: mod_base = OTHER; note = 2'-O-methyluridine-3'-phosphate
  modified_base 12: mod_base = OTHER; note = 2'-O-methyluridine-3'-phosphate
  modified_base 13: mod_base = OTHER; note = 2'-O-methyluridine-3'-phosphate
  modified_base 14: mod_base = OTHER; note = 2'-deoxy-2'-fluoroguanosine-3'-phosphate
  modified_base 15: mod_base = OTHER; note = 2'-O-methylguanosine-3'-phosphate
  modified_base 16: mod_base = OTHER; note = 2'-deoxy-2'-fluorocytidine-3'-phosphate
  modified_base 17: mod_base = OTHER; note = 2'-O-methylcytidine-3'-phosphate
  modified_base 18: mod_base = OTHER; note = 2'-O-methylcytidine-3'-phosphate
  modified_base 19: mod_base = OTHER; note = 2'-O-methyladenosine-3'-phosphate
  modified_base 20: mod_base = OTHER; note = 2'-O-methylcytidine-3'-phosphate
  modified_base 21: mod_base = OTHER; note = 2'-O-methylcytidine-3'-phosphorothioate
  modified_base 22: mod_base = OTHER; note = 2'-O-methylguanosine-3'-phosphorothioate
  modified_base 23: mod_base = OTHER; note = 2'-O-methyluridine
atcttcatcctttggcccaccgt

SEQ ID NO: 927 - RNA, 23 nt, synthetic construct
  source 1..23: mol_type = other RNA
  modified_base 1: mod_base = OTHER; note = 2'-O-methyladenosine-3'-phosphorothioate
  modified_base 2: mod_base = OTHER; note = 2'-deoxy-2'-fluoroadenosine-3'-phosphorothioate
  modified_base 3: mod_base = OTHER; note = 2'-O-methyluridine-3'-phosphate
  modified_base 4: mod_base = OTHER; note = 2'-O-methylguanosine-3'-phosphate
  modified_base 5: mod_base = OTHER; note = 2'-O-methylcytidine-3'-phosphate
  modified_base 6: mod_base = OTHER; note = 2'-O-methylcytidine-3'-phosphate
  modified_base 7: mod_base = OTHER; note = Thymidine-glycol nucleic acid (GNA), S-Isomer
  modified_base 8: mod_base = OTHER; note = 2'-O-methylcytidine-3'-phosphate
  modified_base 9: mod_base = OTHER; note = 2'-O-methyluridine-3'-phosphate
  modified_base 10: mod_base = OTHER; note = 2'-O-methylcytidine-3'-phosphate
  modified_base 11: mod_base = OTHER; note = 2'-O-methyluridine-3'-phosphate
  modified_base 12: mod_base = OTHER; note = 2'-O-methyluridine-3'-phosphate
  modified_base 13: mod_base = OTHER; note = 2'-O-methylcytidine-3'-phosphate
  modified_base 14: mod_base = OTHER; note = 2'-deoxy-2'-fluoroadenosine-3'-phosphate
  modified_base 15: mod_base = OTHER; note = 2'-O-methyluridine-3'-phosphate
  modified_base 16: mod_base = OTHER; note = 2'-deoxy-2'-fluorocytidine-3'-phosphate
  modified_base 17: mod_base = OTHER; note = 2'-O-methylcytidine-3'-phosphate
  modified_base 18: mod_base = OTHER; note = 2'-O-methyluridine-3'-phosphate
  modified_base 19: mod_base = OTHER; note = 2'-O-methyluridine-3'-phosphate
  modified_base 20: mod_base = OTHER; note = 2'-O-methyluridine-3'-phosphate
  modified_base 21: mod_base = OTHER; note = 2'-O-methylguanosine-3'-phosphorothioate
  modified_base 22: mod_base = OTHER; note = 2'-O-methylguanosine-3'-phosphorothioate
  modified_base 23: mod_base = OTHER; note = 2'-O-methylcytidine
aatgcctctcttcatcctttggc

SEQ ID NO: 928 - RNA, 23 nt, synthetic construct
  source 1..23: mol_type = other RNA
  modified_base 1: mod_base = OTHER; note = 2'-O-methyladenosine-3'-phosphorothioate
  modified_base 2: mod_base = OTHER; note = 2'-deoxy-2'-fluoroadenosine-3'-phosphorothioate
  modified_base 3: mod_base = OTHER; note = 2'-O-methylcytidine-3'-phosphate
  modified_base 4: mod_base = OTHER; note = 2'-O-methyladenosine-3'-phosphate
  modified_base 5: mod_base = OTHER; note = 2'-O-methyluridine-3'-phosphate
  modified_base 6: mod_base = OTHER; note = 2'-O-methylguanosine-3'-phosphate
  modified_base 7: mod_base = OTHER; note = Cytidine-glycol nucleic acid (GNA), S-isomer
  modified_base 8: mod_base = OTHER; note = 2'-O-methylcytidine-3'-phosphate
  modified_base 9: mod_base = OTHER; note = 2'-O-methyluridine-3'-phosphate
  modified_base 10: mod_base = OTHER; note = 2'-O-methylcytidine-3'-phosphate
  modified_base 11: mod_base = OTHER; note = 2'-O-methyluridine-3'-phosphate
  modified_base 12: mod_base = OTHER; note = 2'-O-methylcytidine-3'-phosphate
  modified_base 13: mod_base = OTHER; note = 2'-O-methyluridine-3'-phosphate
  modified_base 14: mod_base = OTHER; note = 2'-deoxy-2'-fluorouridine-3'-phosphate
  modified_base 15: mod_base = OTHER; note = 2'-O-methylcytidine-3'-phosphate
  modified_base 16: mod_base = OTHER; note = 2'-deoxy-2'-fluoroadenosine-3'-phosphate
  modified_base 17: mod_base = OTHER; note = 2'-O-methyluridine-3'-phosphate
  modified_base 18: mod_base = OTHER; note = 2'-O-methylcytidine-3'-phosphate
  modified_base 19: mod_base = OTHER; note = 2'-O-methylcytidine-3'-phosphate
  modified_base 20: mod_base = OTHER; note = 2'-O-methyluridine-3'-phosphate
  modified_base 21: mod_base = OTHER; note = 2'-O-methyluridine-3'-phosphorothioate
  modified_base 22: mod_base = OTHER; note = 2'-O-methyluridine-3'-phosphorothioate
  modified_base 23: mod_base = OTHER; note = 2'-O-methylguanosine
aacatgcctctcttcatcctttg

SEQ ID NO: 929 - RNA, 23 nt, synthetic construct
  source 1..23: mol_type = other RNA
  modified_base 1: mod_base = OTHER; note = 2'-O-methyladenosine-3'-phosphorothioate
  modified_base 2: mod_base = OTHER; note = 2'-deoxy-2'-fluoroadenosine-3'-phosphorothioate
  modified_base 3: mod_base = OTHER; note = 2'-O-methyladenosine-3'-phosphate
  modified_base 4: mod_base = OTHER; note = 2'-O-methylcytidine-3'-phosphate
  modified_base 5: mod_base = OTHER; note = 2'-O-methyladenosine-3'-phosphate
  modified_base 6: mod_base = OTHER; note = 2'-O-methyluridine-3'-phosphate
  modified_base 7: mod_base = OTHER; note = Guanosine-glycol nucleic acid (GNA), S-isomer
  modified_base 8: mod_base = OTHER; note = 2'-O-methylcytidine-3'-phosphate
  modified_base 9: mod_base = OTHER; note = 2'-O-methylcytidine-3'-phosphate
  modified_base 10: mod_base = OTHER; note = 2'-O-methyluridine-3'-phosphate
  modified_base 11: mod_base = OTHER; note = 2'-O-methylcytidine-3'-phosphate
  modified_base 12: mod_base = OTHER; note = 2'-O-methyluridine-3'-phosphate
  modified_base 13: mod_base = OTHER; note = 2'-O-methylcytidine-3'-phosphate
  modified_base 14: mod_base = OTHER; note = 2'-deoxy-2'-fluorouridine-3'-phosphate
  modified_base 15: mod_base = OTHER; note = 2'-O-methyluridine-3'-phosphate
  modified_base 16: mod_base = OTHER; note = 2'-deoxy-2'-fluorocytidine-3'-phosphate
  modified_base 17: mod_base = OTHER; note = 2'-O-methyladenosine-3'-phosphate
  modified_base 18: mod_base = OTHER; note = 2'-O-methyluridine-3'-phosphate
  modified_base 19: mod_base = OTHER; note = 2'-O-methylcytidine-3'-phosphate
  modified_base 20: mod_base = OTHER; note = 2'-O-methylcytidine-3'-phosphate
  modified_base 21: mod_base = OTHER; note = 2'-O-methyluridine-3'-phosphorothioate
  modified_base 22: mod_base = OTHER; note = 2'-O-methyluridine-3'-phosphorothioate
  modified_base 23: mod_base = OTHER; note = 2'-O-methyluridine
aaacatgcctctcttcatccttt

SEQ ID NO: 930 - RNA, 23 nt, synthetic construct
  source 1..23: mol_type = other RNA
  modified_base 1: mod_base = OTHER; note = 2'-O-methyladenosine-3'-phosphorothioate
  modified_base 2: mod_base = OTHER; note = 2'-deoxy-2'-fluorocytidine-3'-phosphorothioate
  modified_base 3: mod_base = OTHER; note = 2'-O-methyladenosine-3'-phosphate
  modified_base 4: mod_base = OTHER; note = 2'-O-methyladenosine-3'-phosphate
  modified_base 5: mod_base = OTHER; note = 2'-O-methylcytidine-3'-phosphate
  modified_base 6: mod_base = OTHER; note = 2'-O-methyladenosine-3'-phosphate
  modified_base 7: mod_base = OTHER; note = Thymidine-glycol nucleic acid (GNA), S-Isomer
  modified_base 8: mod_base = OTHER; note = 2'-O-methylguanosine-3'-phosphate
  modified_base 9: mod_base = OTHER; note = 2'-O-methylcytidine-3'-phosphate
  modified_base 10: mod_base = OTHER; note = 2'-O-methylcytidine-3'-phosphate
  modified_base 11: mod_base = OTHER; note = 2'-O-methyluridine-3'-phosphate
  modified_base 12: mod_base = OTHER; note = 2'-O-methylcytidine-3'-phosphate
  modified_base 13: mod_base = OTHER; note = 2'-O-methyluridine-3'-phosphate
  modified_base 14: mod_base = OTHER; note = 2'-deoxy-2'-fluorocytidine-3'-phosphate
  modified_base 15: mod_base = OTHER; note = 2'-O-methyluridine-3'-phosphate
  modified_base 16: mod_base = OTHER; note = 2'-deoxy-2'-fluorouridine-3'-phosphate
  modified_base 17: mod_base = OTHER; note = 2'-O-methylcytidine-3'-phosphate
  modified_base 18: mod_base = OTHER; note = 2'-O-methyladenosine-3'-phosphate
  modified_base 19: mod_base = OTHER; note = 2'-O-methyluridine-3'-phosphate
  modified_base 20: mod_base = OTHER; note = 2'-O-methylcytidine-3'-phosphate
  modified_base 21: mod_base = OTHER; note = 2'-O-methylcytidine-3'-phosphorothioate
  modified_base 22: mod_base = OTHER; note = 2'-O-methyluridine-3'-phosphorothioate
  modified_base 23: mod_base = OTHER; note = 2'-O-methyluridine
acaacatgcctctcttcatcctt

SEQ ID NO: 931 - RNA, 23 nt, synthetic construct
  source 1..23: mol_type = other RNA
  modified_base 1: mod_base = OTHER; note = 2'-O-methyluridine-3'-phosphorothioate
  modified_base 2: mod_base = OTHER; note = 2'-deoxy-2'-fluorocytidine-3'-phosphorothioate
  modified_base 3: mod_base = OTHER; note = 2'-O-methylcytidine-3'-phosphate
  modified_base 4: mod_base = OTHER; note = 2'-O-methyladenosine-3'-phosphate
  modified_base 5: mod_base = OTHER; note = 2'-O-methyladenosine-3'-phosphate
  modified_base 6: mod_base = OTHER; note = 2'-O-methylcytidine-3'-phosphate
  modified_base 7: mod_base = OTHER; note = Adenosine-glycol nucleic acid (GNA), S-isomer
  modified_base 8: mod_base = OTHER; note = 2'-O-methyluridine-3'-phosphate
  modified_base 9: mod_base = OTHER; note = 2'-O-methylguanosine-3'-phosphate
  modified_base 10: mod_base = OTHER; note = 2'-O-methylcytidine-3'-phosphate
  modified_base 11: mod_base = OTHER; note = 2'-O-methylcytidine-3'-phosphate
  modified_base 12: mod_base = OTHER; note = 2'-O-methyluridine-3'-phosphate
  modified_base 13: mod_base = OTHER; note = 2'-O-methylcytidine-3'-phosphate
  modified_base 14: mod_base = OTHER; note = 2'-deoxy-2'-fluorouridine-3'-phosphate
  modified_base 15: mod_base = OTHER; note = 2'-O-methylcytidine-3'-phosphate
  modified_base 16: mod_base = OTHER; note = 2'-deoxy-2'-fluorouridine-3'-phosphate
  modified_base 17: mod_base = OTHER; note = 2'-O-methyluridine-3'-phosphate
  modified_base 18: mod_base = OTHER; note = 2'-O-methylcytidine-3'-phosphate
  modified_base 19: mod_base = OTHER; note = 2'-O-methyladenosine-3'-phosphate
  modified_base 20: mod_base = OTHER; note = 2'-O-methyluridine-3'-phosphate
  modified_base 21: mod_base = OTHER; note = 2'-O-methylcytidine-3'-phosphorothioate
  modified_base 22: mod_base = OTHER; note = 2'-O-methylcytidine-3'-phosphorothioate
  modified_base 23: mod_base = OTHER; note = 2'-O-methyluridine
tccaacatgcctctcttcatcct

SEQ ID NO: 932 - RNA, 23 nt, synthetic construct
  source 1..23: mol_type = other RNA
  modified_base 1: mod_base = OTHER; note = 2'-O-methyladenosine-3'-phosphorothioate
  modified_base 2: mod_base = OTHER; note = 2'-deoxy-2'-fluorouridine-3'-phosphorothioate
  modified_base 3: mod_base = OTHER; note = 2'-O-methylcytidine-3'-phosphate
  modified_base 4: mod_base = OTHER; note = 2'-O-methylcytidine-3'-phosphate
  modified_base 5: mod_base = OTHER; note = 2'-O-methyladenosine-3'-phosphate
  modified_base 6: mod_base = OTHER; note = 2'-O-methyladenosine-3'-phosphate
  modified_base 7: mod_base = OTHER; note = Cytidine-glycol nucleic acid (GNA), S-isomer
  modified_base 8: mod_base = OTHER; note = 2'-O-methyladenosine-3'-phosphate
  modified_base 9: mod_base = OTHER; note = 2'-O-methyluridine-3'-phosphate
  modified_base 10: mod_base = OTHER; note = 2'-O-methylguanosine-3'-phosphate
  modified_base 11: mod_base = OTHER; note = 2'-O-methylcytidine-3'-phosphate
  modified_base 12: mod_base = OTHER; note = 2'-O-methylcytidine-3'-phosphate
  modified_base 13: mod_base = OTHER; note = 2'-O-methyluridine-3'-phosphate
  modified_base 14: mod_base = OTHER; note = 2'-deoxy-2'-fluorocytidine-3'-phosphate
  modified_base 15: mod_base = OTHER; note = 2'-O-methyluridine-3'-phosphate
  modified_base 16: mod_base = OTHER; note = 2'-deoxy-2'-fluorocytidine-3'-phosphate
  modified_base 17: mod_base = OTHER; note = 2'-O-methyluridine-3'-phosphate
  modified_base 18: mod_base = OTHER; note = 2'-O-methyluridine-3'-phosphate
  modified_base 19: mod_base = OTHER; note = 2'-O-methylcytidine-3'-phosphate
  modified_base 20: mod_base = OTHER; note = 2'-O-methyladenosine-3'-phosphate
  modified_base 21: mod_base = OTHER; note = 2'-O-methyluridine-3'-phosphorothioate
  modified_base 22: mod_base = OTHER; note = 2'-O-methylcytidine-3'-phosphorothioate
  modified_base 23: mod_base = OTHER; note = 2'-O-methylcytidine
atccaacatgcctctcttcatcc

SEQ ID NO: 933 - RNA, 23 nt, synthetic construct
  source 1..23: mol_type = other RNA
  modified_base 1: mod_base = OTHER; note = 2'-O-methyladenosine-3'-phosphorothioate
  modified_base 2: mod_base = OTHER; note = 2'-deoxy-2'-fluoroguanosine-3'-phosphorothioate
  modified_base 3: mod_base = OTHER; note = 2'-O-methyluridine-3'-phosphate
  modified_base 4: mod_base = OTHER; note = 2'-O-methylcytidine-3'-phosphate
  modified_base 5: mod_base = OTHER; note = 2'-O-methyluridine-3'-phosphate
  modified_base 6: mod_base = OTHER; note = 2'-O-methylcytidine-3'-phosphate
  modified_base 7: mod_base = OTHER; note = Cytidine-glycol nucleic acid (GNA), S-isomer
  modified_base 8: mod_base = OTHER; note = 2'-O-methyladenosine-3'-phosphate
  modified_base 9: mod_base = OTHER; note = 2'-O-methyladenosine-3'-phosphate
  modified_base 10: mod_base = OTHER; note = 2'-O-methylcytidine-3'-phosphate
  modified_base 11: mod_base = OTHER; note = 2'-O-methyladenosine-3'-phosphate
  modified_base 12: mod_base = OTHER; note = 2'-O-methyluridine-3'-phosphate
  modified_base 13: mod_base = OTHER; note = 2'-O-methylguanosine-3'-phosphate
  modified_base 14: mod_base = OTHER; note = 2'-deoxy-2'-fluorocytidine-3'-phosphate
  modified_base 15: mod_base = OTHER; note = 2'-O-methylcytidine-3'-phosphate
  modified_base 16: mod_base = OTHER; note = 2'-deoxy-2'-fluorouridine-3'-phosphate
  modified_base 17: mod_base = OTHER; note = 2'-O-methylcytidine-3'-phosphate
  modified_base 18: mod_base = OTHER; note = 2'-O-methyluridine-3'-phosphate
  modified_base 19: mod_base = OTHER; note = 2'-O-methylcytidine-3'-phosphate
  modified_base 20: mod_base = OTHER; note = 2'-O-methyluridine-3'-phosphate
  modified_base 21: mod_base = OTHER; note = 2'-O-methyluridine-3'-phosphorothioate
  modified_base 22: mod_base = OTHER; note = 2'-O-methylcytidine-3'-phosphorothioate
  modified_base 23: mod_base = OTHER; note = 2'-O-methyladenosine
agtctccaacatgcctctcttca

SEQ ID NO: 934 - RNA, 23 nt, synthetic construct
  source 1..23: mol_type = other RNA
  modified_base 1: mod_base = OTHER; note = 2'-O-methyladenosine-3'-phosphorothioate
  modified_base 2: mod_base = OTHER; note = 2'-deoxy-2'-fluorocytidine-3'-phosphorothioate
  modified_base 3: mod_base = OTHER; note = 2'-O-methyladenosine-3'-phosphate
  modified_base 4: mod_base = OTHER; note = 2'-O-methylguanosine-3'-phosphate
  modified_base 5: mod_base = OTHER; note = 2'-O-methyladenosine-3'-phosphate
  modified_base 6: mod_base = OTHER; note = 2'-O-methyladenosine-3'-phosphate
  modified_base 7: mod_base = OTHER; note = Thymidine-glycol nucleic acid (GNA), S-Isomer
  modified_base 8: mod_base = OTHER; note = 2'-O-methylcytidine-3'-phosphate
  modified_base 9: mod_base = OTHER; note = 2'-O-methyluridine-3'-phosphate
  modified_base 10: mod_base = OTHER; note = 2'-O-methyluridine-3'-phosphate
  modified_base 11: mod_base = OTHER; note = 2'-O-methylcytidine-3'-phosphate
  modified_base 12: mod_base = OTHER; note = 2'-O-methyladenosine-3'-phosphate
  modified_base 13: mod_base = OTHER; note = 2'-O-methyladenosine-3'-phosphate
  modified_base 14: mod_base = OTHER; note = 2'-deoxy-2'-fluorouridine-3'-phosphate
  modified_base 15: mod_base = OTHER; note = 2'-O-methyladenosine-3'-phosphate
  modified_base 16: mod_base = OTHER; note = 2'-deoxy-2'-fluoroguanosine-3'-phosphate
  modified_base 17: mod_base = OTHER; note = 2'-O-methyladenosine-3'-phosphate
  modified_base 18: mod_base = OTHER; note = 2'-O-methylcytidine-3'-phosphate
  modified_base 19: mod_base = OTHER; note = 2'-O-methyladenosine-3'-phosphate
  modified_base 20: mod_base = OTHER; note = 2'-O-methylcytidine-3'-phosphate
  modified_base 21: mod_base = OTHER; note = 2'-O-methyladenosine-3'-phosphorothioate
  modified_base 22: mod_base = OTHER; note = 2'-O-methyluridine-3'-phosphorothioate
  modified_base 23: mod_base = OTHER; note = 2'-O-methylcytidine
acagaatcttcaatagacacatc

SEQ ID NO: 935 - RNA, 23 nt, synthetic construct
  source 1..23: mol_type = other RNA
  modified_base 1: mod_base = OTHER; note = 2'-O-methyladenosine-3'-phosphorothioate
  modified_base 2: mod_base = OTHER; note = 2'-deoxy-2'-fluoroadenosine-3'-phosphorothioate
  modified_base 3: mod_base = OTHER; note = 2'-O-methylcytidine-3'-phosphate
  modified_base 4: mod_base = OTHER; note = 2'-O-methyladenosine-3'-phosphate
  modified_base 5: mod_base = OTHER; note = 2'-O-methylguanosine-3'-phosphate
  modified_base 6: mod_base = OTHER; note = 2'-O-methyladenosine-3'-phosphate
  modified_base 7: mod_base = OTHER; note = Adenosine-glycol nucleic acid (GNA), S-isomer
  modified_base 8: mod_base = OTHER; note = 2'-O-methyluridine-3'-phosphate
  modified_base 9: mod_base = OTHER; note = 2'-O-methylcytidine-3'-phosphate
  modified_base 10: mod_base = OTHER; note = 2'-O-methyluridine-3'-phosphate
  modified_base 11: mod_base = OTHER; note = 2'-O-methyluridine-3'-phosphate
  modified_base 12: mod_base = OTHER; note = 2'-O-methylcytidine-3'-phosphate
  modified_base 13: mod_base = OTHER; note = 2'-O-methyladenosine-3'-phosphate
  modified_base 14: mod_base = OTHER; note = 2'-deoxy-2'-fluoroadenosine-3'-phosphate
  modified_base 15: mod_base = OTHER; note = 2'-O-methyluridine-3'-phosphate
  modified_base 16: mod_base = OTHER; note = 2'-deoxy-2'-fluoroadenosine-3'-phosphate
  modified_base 17: mod_base = OTHER; note = 2'-O-methylguanosine-3'-phosphate
  modified_base 18: mod_base = OTHER; note = 2'-O-methyladenosine-3'-phosphate
  modified_base 19: mod_base = OTHER; note = 2'-O-methylcytidine-3'-phosphate
  modified_base 20: mod_base = OTHER; note = 2'-O-methyladenosine-3'-phosphate
  modified_base 21: mod_base = OTHER; note = 2'-O-methylcytidine-3'-phosphorothioate
  modified_base 22: mod_base = OTHER; note = 2'-O-methyladenosine-3'-phosphorothioate
  modified_base 23: mod_base = OTHER; note = 2'-O-methyluridine
aacagaatcttcaatagacacat

SEQ ID NO: 936 - RNA, 23 nt, synthetic construct
  source 1..23: mol_type = other RNA
  modified_base 1: mod_base = OTHER; note = 2'-O-methyladenosine-3'-phosphorothioate
  modified_base 2: mod_base = OTHER; note = 2'-deoxy-2'-fluoroguanosine-3'-phosphorothioate
  modified_base 3: mod_base = OTHER; note = 2'-O-methylcytidine-3'-phosphate
  modified_base 4: mod_base = OTHER; note = 2'-O-methylcytidine-3'-phosphate
  modified_base 5: mod_base = OTHER; note = 2'-O-methyladenosine-3'-phosphate
  modified_base 6: mod_base = OTHER; note = 2'-O-methyladenosine-3'-phosphate
  modified_base 7: mod_base = OTHER; note = Thymidine-glycol nucleic acid (GNA), S-Isomer
  modified_base 8: mod_base = OTHER; note = 2'-O-methylguanosine-3'-phosphate
  modified_base 9: mod_base = OTHER; note = 2'-O-methyladenosine-3'-phosphate
  modified_base 10: mod_base = OTHER; note = 2'-O-methyluridine-3'-phosphate
  modified_base 11: mod_base = OTHER; note = 2'-O-methylguanosine-3'-phosphate
  modified_base 12: mod_base = OTHER; note = 2'-O-methylcytidine-3'-phosphate
  modified_base 13: mod_base = OTHER; note = 2'-O-methyladenosine-3'-phosphate
  modified_base 14: mod_base = OTHER; note = 2'-deoxy-2'-fluoroadenosine-3'-phosphate
  modified_base 15: mod_base = OTHER; note = 2'-O-methyluridine-3'-phosphate
  modified_base 16: mod_base = OTHER; note = 2'-deoxy-2'-fluoroguanosine-3'-phosphate
  modified_base 17: mod_base = OTHER; note = 2'-O-methylguanosine-3'-phosphate
  modified_base 18: mod_base = OTHER; note = 2'-O-methyluridine-3'-phosphate
  modified_base 19: mod_base = OTHER; note = 2'-O-methylcytidine-3'-phosphate
  modified_base 20: mod_base = OTHER; note = 2'-O-methyluridine-3'-phosphate
  modified_base 21: mod_base = OTHER; note = 2'-O-methylcytidine-3'-phosphorothioate
  modified_base 22: mod_base = OTHER; note = 2'-O-methylcytidine-3'-phosphorothioate
  modified_base 23: mod_base = OTHER; note = 2'-O-methyluridine
agccaatgatgcaatggtctcct

SEQ ID NO: 937 - RNA, 23 nt, synthetic construct
  source 1..23: mol_type = other RNA
  modified_base 1: mod_base = OTHER; note = 2'-O-methyladenosine-3'-phosphorothioate
  modified_base 2: mod_base = OTHER; note = 2'-deoxy-2'-fluorocytidine-3'-phosphorothioate
  modified_base 3: mod_base = OTHER; note = 2'-O-methyluridine-3'-phosphate
  modified_base 4: mod_base = OTHER; note = 2'-O-methyluridine-3'-phosphate
  modified_base 5: mod_base = OTHER; note = 2'-O-methyluridine-3'-phosphate
  modified_base 6: mod_base = OTHER; note = 2'-O-methyluridine-3'-phosphate
  modified_base 7: mod_base = OTHER; note = Thymidine-glycol nucleic acid (GNA), S-Isomer
  modified_base 8: mod_base = OTHER; note = 2'-O-methylcytidine-3'-phosphate
  modified_base 9: mod_base = OTHER; note = 2'-O-methyladenosine-3'-phosphate
  modified_base 10: mod_base = OTHER; note = 2'-O-methyluridine-3'-phosphate
  modified_base 11: mod_base = OTHER; note = 2'-O-methylguanosine-3'-phosphate
  modified_base 12: mod_base = OTHER; note = 2'-O-methylguanosine-3'-phosphate
  modified_base 13: mod_base = OTHER; note = 2'-O-methyladenosine-3'-phosphate
  modified_base 14: mod_base = OTHER; note = 2'-deoxy-2'-fluorocytidine-3'-phosphate
  modified_base 15: mod_base = OTHER; note = 2'-O-methylcytidine-3'-phosphate
  modified_base 16: mod_base = OTHER; note = 2'-deoxy-2'-fluoroadenosine-3'-phosphate
  modified_base 17: mod_base = OTHER; note = 2'-O-methylcytidine-3'-phosphate
  modified_base 18: mod_base = OTHER; note = 2'-O-methylcytidine-3'-phosphate
  modified_base 19: mod_base = OTHER; note = 2'-O-methyladenosine-3'-phosphate
  modified_base 20: mod_base = OTHER; note = 2'-O-methylguanosine-3'-phosphate
  modified_base 21: mod_base = OTHER; note = 2'-O-methyluridine-3'-phosphorothioate
  modified_base 22: mod_base = OTHER; note = 2'-O-methylguanosine-3'-phosphorothioate
  modified_base 23: mod_base = OTHER; note = 2'-O-methyluridine
actttttcatggaccaccagtgt

SEQ ID NO: 938 - RNA, 23 nt, synthetic construct
  source 1..23: mol_type = other RNA
  modified_base 1: mod_base = OTHER; note = 2'-O-methyluridine-3'-phosphorothioate
  modified_base 2: mod_base = OTHER; note = 2'-deoxy-2'-fluoroguanosine-3'-phosphorothioate
  modified_base 3: mod_base = OTHER; note = 2'-O-methylcytidine-3'-phosphate
  modified_base 4: mod_base = OTHER; note = 2'-O-methyluridine-3'-phosphate
  modified_base 5: mod_base = OTHER; note = 2'-O-methyluridine-3'-phosphate
  modified_base 6: mod_base = OTHER; note = 2'-O-methyluridine-3'-phosphate
  modified_base 7: mod_base = OTHER; note = Thymidine-glycol nucleic acid (GNA), S-Isomer
  modified_base 8: mod_base = OTHER; note = 2'-O-methyluridine-3'-phosphate
  modified_base 9: mod_base = OTHER; note = 2'-O-methylcytidine-3'-phosphate
  modified_base 10: mod_base = OTHER; note = 2'-O-methyladenosine-3'-phosphate
  modified_base 11: mod_base = OTHER; note = 2'-O-methyluridine-3'-phosphate
  modified_base 12: mod_base = OTHER; note = 2'-O-methylguanosine-3'-phosphate
  modified_base 13: mod_base = OTHER; note = 2'-O-methylguanosine-3'-phosphate
  modified_base 14: mod_base = OTHER; note = 2'-deoxy-2'-fluoroadenosine-3'-phosphate
  modified_base 15: mod_base = OTHER; note = 2'-O-methylcytidine-3'-phosphate
  modified_base 16: mod_base = OTHER; note = 2'-deoxy-2'-fluorocytidine-3'-phosphate
  modified_base 17: mod_base = OTHER; note = 2'-O-methyladenosine-3'-phosphate
  modified_base 18: mod_base = OTHER; note = 2'-O-methylcytidine-3'-phosphate
  modified_base 19: mod_base = OTHER; note = 2'-O-methylcytidine-3'-phosphate
  modified_base 20: mod_base = OTHER; note = 2'-O-methyladenosine-3'-phosphate
  modified_base 21: mod_base = OTHER; note = 2'-O-methylguanosine-3'-phosphorothioate
  modified_base 22: mod_base = OTHER; note = 2'-O-methyluridine-3'-phosphorothioate
  modified_base 23: mod_base = OTHER; note = 2'-O-methylguanosine
tgctttttcatggaccaccagtg

SEQ ID NO: 939 - RNA, 23 nt, synthetic construct
  source 1..23: mol_type = other RNA
  modified_base 1: mod_base = OTHER; note = 2'-O-methyladenosine-3'-phosphorothioate
  modified_base 2: mod_base = OTHER; note = 2'-deoxy-2'-fluorouridine-3'-phosphorothioate
  modified_base 3: mod_base = OTHER; note = 2'-O-methylguanosine-3'-phosphate
  modified_base 4: mod_base = OTHER; note = 2'-O-methylcytidine-3'-phosphate
  modified_base 5: mod_base = OTHER; note = 2'-O-methyluridine-3'-phosphate
  modified_base 6: mod_base = OTHER; note = 2'-O-methyluridine-3'-phosphate
  modified_base 7: mod_base = OTHER; note = Thymidine-glycol nucleic acid (GNA), S-Isomer
  modified_base 8: mod_base = OTHER; note = 2'-O-methyluridine-3'-phosphate
  modified_base 9: mod_base = OTHER; note = 2'-O-methyluridine-3'-phosphate
  modified_base 10: mod_base = OTHER; note = 2'-O-methylcytidine-3'-phosphate
  modified_base 11: mod_base = OTHER; note = 2'-O-methyladenosine-3'-phosphate
  modified_base 12: mod_base = OTHER; note = 2'-O-methyluridine-3'-phosphate
  modified_base 13: mod_base = OTHER; note = 2'-O-methylguanosine-3'-phosphate
  modified_base 14: mod_base = OTHER; note = 2'-deoxy-2'-fluoroguanosine-3'-phosphate
  modified_base 15: mod_base = OTHER; note = 2'-O-methyladenosine-3'-phosphate
  modified_base 16: mod_base = OTHER; note = 2'-deoxy-2'-fluorocytidine-3'-phosphate
  modified_base 17: mod_base = OTHER; note = 2'-O-methylcytidine-3'-phosphate
  modified_base 18: mod_base = OTHER; note = 2'-O-methyladenosine-3'-phosphate
  modified_base 19: mod_base = OTHER; note = 2'-O-methylcytidine-3'-phosphate
  modified_base 20: mod_base = OTHER; note = 2'-O-methylcytidine-3'-phosphate
  modified_base 21: mod_base = OTHER; note = 2'-O-methyladenosine-3'-phosphorothioate
  modified_base 22: mod_base = OTHER; note = 2'-O-methylguanosine-3'-phosphorothioate
  modified_base 23: mod_base = OTHER; note = 2'-O-methyluridine
atgctttttcatggaccaccagt

SEQ ID NO: 940 - RNA, 23 nt, synthetic construct
  source 1..23: mol_type = other RNA
  modified_base 1: mod_base = OTHER; note = 2'-O-methyluridine-3'-phosphorothioate
  modified_base 2: mod_base = OTHER; note = 2'-deoxy-2'-fluorocytidine-3'-phosphorothioate
  modified_base 3: mod_base = OTHER; note = 2'-O-methyluridine-3'-phosphate
  modified_base 4: mod_base = OTHER; note = 2'-O-methylguanosine-3'-phosphate
  modified_base 5: mod_base = OTHER; note = 2'-O-methylcytidine-3'-phosphate
  modified_base 6: mod_base = OTHER; note = 2'-O-methyluridine-3'-phosphate
  modified_base 7: mod_base = OTHER; note = Thymidine-glycol nucleic acid (GNA), S-Isomer
  modified_base 8: mod_base = OTHER; note = 2'-O-methyluridine-3'-phosphate
  modified_base 9: mod_base = OTHER; note = 2'-O-methyluridine-3'-phosphate
  modified_base 10: mod_base = OTHER; note = 2'-O-methyluridine-3'-phosphate
  modified_base 11: mod_base = OTHER; note = 2'-O-methylcytidine-3'-phosphate
  modified_base 12: mod_base = OTHER; note = 2'-O-methyladenosine-3'-phosphate
  modified_base 13: mod_base = OTHER; note = 2'-O-methyluridine-3'-phosphate
  modified_base 14: mod_base = OTHER; note = 2'-deoxy-2'-fluoroguanosine-3'-phosphate
  modified_base 15: mod_base = OTHER; note = 2'-O-methylguanosine-3'-phosphate
  modified_base 16: mod_base = OTHER; note = 2'-deoxy-2'-fluoroadenosine-3'-phosphate
  modified_base 17: mod_base = OTHER; note = 2'-O-methylcytidine-3'-phosphate
  modified_base 18: mod_base = OTHER; note = 2'-O-methylcytidine-3'-phosphate
  modified_base 19: mod_base = OTHER; note = 2'-O-methyladenosine-3'-phosphate
  modified_base 20: mod_base = OTHER; note = 2'-O-methylcytidine-3'-phosphate
  modified_base 21: mod_base = OTHER; note = 2'-O-methylcytidine-3'-phosphorothioate
  modified_base 22: mod_base = OTHER; note = 2'-O-methyladenosine-3'-phosphorothioate
  modified_base 23: mod_base = OTHER; note = 2'-O-methylguanosine
tctgctttttcatggaccaccag

SEQ ID NO: 941 - RNA, 23 nt, synthetic construct
  source 1..23: mol_type = other RNA
  modified_base 1: mod_base = OTHER; note = 2'-O-methyladenosine-3'-phosphorothioate
  modified_base 2: mod_base = OTHER; note = 2'-deoxy-2'-fluorouridine-3'-phosphorothioate
  modified_base 3: mod_base = OTHER; note = 2'-O-methylcytidine-3'-phosphate
  modified_base 4: mod_base = OTHER; note = 2'-O-methyluridine-3'-phosphate
  modified_base 5: mod_base = OTHER; note = 2'-O-methylguanosine-3'-phosphate
  modified_base 6: mod_base = OTHER; note = 2'-O-methylcytidine-3'-phosphate
  modified_base 7: mod_base = OTHER; note = Thymidine-glycol nucleic acid (GNA), S-Isomer
  modified_base 8: mod_base = OTHER; note = 2'-O-methyluridine-3'-phosphate
  modified_base 9: mod_base = OTHER; note = 2'-O-methyluridine-3'-phosphate
  modified_base 10: mod_base = OTHER; note = 2'-O-methyluridine-3'-phosphate
  modified_base 11: mod_base = OTHER; note = 2'-O-methyluridine-3'-phosphate
  modified_base 12: mod_base = OTHER; note = 2'-O-methylcytidine-3'-phosphate
  modified_base 13: mod_base = OTHER; note = 2'-O-methyladenosine-3'-phosphate
  modified_base 14: mod_base = OTHER; note = 2'-deoxy-2'-fluorouridine-3'-phosphate
  modified_base 15: mod_base = OTHER; note = 2'-O-methylguanosine-3'-phosphate
  modified_base 16: mod_base = OTHER; note = 2'-deoxy-2'-fluoroguanosine-3'-phosphate
  modified_base 17: mod_base = OTHER; note = 2'-O-methyladenosine-3'-phosphate
  modified_base 18: mod_base = OTHER; note = 2'-O-methylcytidine-3'-phosphate
  modified_base 19: mod_base = OTHER; note = 2'-O-methylcytidine-3'-phosphate
  modified_base 20: mod_base = OTHER; note = 2'-O-methyladenosine-3'-phosphate
  modified_base 21: mod_base = OTHER; note = 2'-O-methylcytidine-3'-phosphorothioate
  modified_base 22: mod_base = OTHER; note = 2'-O-methylcytidine-3'-phosphorothioate
  modified_base 23: mod_base = OTHER; note = 2'-O-methyladenosine
atctgctttttcatggaccacca

SEQ ID NO: 942 - RNA, 23 nt, synthetic construct
  source 1..23: mol_type = other RNA
  modified_base 1: mod_base = OTHER; note = 2'-O-methyladenosine-3'-phosphorothioate
  modified_base 2: mod_base = OTHER; note = 2'-deoxy-2'-fluoroadenosine-3'-phosphorothioate
  modified_base 3: mod_base = OTHER; note = 2'-O-methyluridine-3'-phosphate
  modified_base 4: mod_base = OTHER; note = 2'-O-methylcytidine-3'-phosphate
  modified_base 5: mod_base = OTHER; note = 2'-O-methyluridine-3'-phosphate
  modified_base 6: mod_base = OTHER; note = 2'-O-methylguanosine-3'-phosphate
  modified_base 7: mod_base = OTHER; note = Cytidine-glycol nucleic acid (GNA), S-isomer
  modified_base 8: mod_base = OTHER; note = 2'-O-methyluridine-3'-phosphate
  modified_base 9: mod_base = OTHER; note = 2'-O-methyluridine-3'-phosphate
  modified_base 10: mod_base = OTHER; note = 2'-O-methyluridine-3'-phosphate
  modified_base 11: mod_base = OTHER; note = 2'-O-methyluridine-3'-phosphate
  modified_base 12: mod_base = OTHER; note = 2'-O-methyluridine-3'-phosphate
  modified_base 13: mod_base = OTHER; note = 2'-O-methylcytidine-3'-phosphate
  modified_base 14: mod_base = OTHER; note = 2'-deoxy-2'-fluoroadenosine-3'-phosphate
  modified_base 15: mod_base = OTHER; note = 2'-O-methyluridine-3'-phosphate
  modified_base 16: mod_base = OTHER; note = 2'-deoxy-2'-fluoroguanosine-3'-phosphate
  modified_base 17: mod_base = OTHER; note = 2'-O-methylguanosine-3'-phosphate
  modified_base 18: mod_base = OTHER; note = 2'-O-methyladenosine-3'-phosphate
  modified_base 19: mod_base = OTHER; note = 2'-O-methylcytidine-3'-phosphate
  modified_base 20: mod_base = OTHER; note = 2'-O-methylcytidine-3'-phosphate
  modified_base 21: mod_base = OTHER; note = 2'-O-methyladenosine-3'-phosphorothioate
  modified_base 22: mod_base = OTHER; note = 2'-O-methylcytidine-3'-phosphorothioate
  modified_base 23: mod_base = OTHER; note = 2'-O-methylcytidine
aatctgctttttcatggaccacc

SEQ ID NO: 943 - RNA, 23 nt, synthetic construct
  source 1..23: mol_type = other RNA
  modified_base 1: mod_base = OTHER; note = 2'-O-methyluridine-3'-phosphorothioate
  modified_base 2: mod_base = OTHER; note = 2'-deoxy-2'-fluorocytidine-3'-phosphorothioate
  modified_base 3: mod_base = OTHER; note = 2'-O-methyladenosine-3'-phosphate
  modified_base 4: mod_base = OTHER; note = 2'-O-methyluridine-3'-phosphate
  modified_base 5: mod_base = OTHER; note = 2'-O-methylcytidine-3'-phosphate
  modified_base 6: mod_base = OTHER; note = 2'-O-methyluridine-3'-phosphate
  modified_base 7: mod_base = OTHER; note = Guanosine-glycol nucleic acid (GNA), S-isomer
  modified_base 8: mod_base = OTHER; note = 2'-O-methylcytidine-3'-phosphate
  modified_base 9: mod_base = OTHER; note = 2'-O-methyluridine-3'-phosphate
  modified_base 10: mod_base = OTHER; note = 2'-O-methyluridine-3'-phosphate
  modified_base 11: mod_base = OTHER; note = 2'-O-methyluridine-3'-phosphate
  modified_base 12: mod_base = OTHER; note = 2'-O-methyluridine-3'-phosphate
  modified_base 13: mod_base = OTHER; note = 2'-O-methyluridine-3'-phosphate
  modified_base 14: mod_base = OTHER; note = 2'-deoxy-2'-fluorocytidine-3'-phosphate
  modified_base 15: mod_base = OTHER; note = 2'-O-methyladenosine-3'-phosphate
  modified_base 16: mod_base = OTHER; note = 2'-deoxy-2'-fluorouridine-3'-phosphate
  modified_base 17: mod_base = OTHER; note = 2'-O-methylguanosine-3'-phosphate
  modified_base 18: mod_base = OTHER; note = 2'-O-methylguanosine-3'-phosphate
  modified_base 19: mod_base = OTHER; note = 2'-O-methyladenosine-3'-phosphate
  modified_base 20: mod_base = OTHER; note = 2'-O-methylcytidine-3'-phosphate
  modified_base 21: mod_base = OTHER; note = 2'-O-methylcytidine-3'-phosphorothioate
  modified_base 22: mod_base = OTHER; note = 2'-O-methyladenosine-3'-phosphorothioate
  modified_base 23: mod_base = OTHER; note = 2'-O-methylcytidine
tcatctgctttttcatggaccac

SEQ ID NO: 944 - RNA, 23 nt, synthetic construct
  source 1..23: mol_type = other RNA
  modified_base 1: mod_base = OTHER; note = 2'-O-methyladenosine-3'-phosphorothioate
  modified_base 2: mod_base = OTHER; note = 2'-deoxy-2'-fluorocytidine-3'-phosphorothioate
  modified_base 3: mod_base = OTHER; note = 2'-O-methylcytidine-3'-phosphate
  modified_base 4: mod_base = OTHER; note = 2'-O-methyluridine-3'-phosphate
  modified_base 5: mod_base = OTHER; note = 2'-O-methyluridine-3'-phosphate
  modified_base 6: mod_base = OTHER; note = 2'-O-methyluridine-3'-phosphate
  modified_base 7: mod_base = OTHER; note = Guanosine-glycol nucleic acid (GNA), S-isomer
  modified_base 8: mod_base = OTHER; note = 2'-O-methylcytidine-3'-phosphate
  modified_base 9: mod_base = OTHER; note = 2'-O-methylcytidine-3'-phosphate
  modified_base 10: mod_base = OTHER; note = 2'-O-methylcytidine-3'-phosphate
  modified_base 11: mod_base = OTHER; note = 2'-O-methyladenosine-3'-phosphate
  modified_base 12: mod_base = OTHER; note = 2'-O-methyladenosine-3'-phosphate
  modified_base 13: mod_base = OTHER; note = 2'-O-methylguanosine-3'-phosphate
  modified_base 14: mod_base = OTHER; note = 2'-deoxy-2'-fluorouridine-3'-phosphate
  modified_base 15: mod_base = OTHER; note = 2'-O-methylcytidine-3'-phosphate
  modified_base 16: mod_base = OTHER; note = 2'-deoxy-2'-fluoroadenosine-3'-phosphate
  modified_base 17: mod_base = OTHER; note = 2'-O-methyluridine-3'-phosphate
  modified_base 18: mod_base = OTHER; note = 2'-O-methylcytidine-3'-phosphate
  modified_base 19: mod_base = OTHER; note = 2'-O-methyluridine-3'-phosphate
  modified_base 20: mod_base = OTHER; note = 2'-O-methylguanosine-3'-phosphate
  modified_base 21: mod_base = OTHER; note = 2'-O-methylcytidine-3'-phosphorothioate
  modified_base 22: mod_base = OTHER; note = 2'-O-methyluridine-3'-phosphorothioate
  modified_base 23: mod_base = OTHER; note = 2'-O-methyluridine
acctttgcccaagtcatctgctt

SEQ ID NO: 945 - RNA, 23 nt, synthetic construct
  source 1..23: mol_type = other RNA
  modified_base 1: mod_base = OTHER; note = 2'-O-methyladenosine-3'-phosphorothioate
  modified_base 2: mod_base = OTHER; note = 2'-deoxy-2'-fluorocytidine-3'-phosphorothioate
  modified_base 3: mod_base = OTHER; note = 2'-O-methyladenosine-3'-phosphate
  modified_base 4: mod_base = OTHER; note = 2'-O-methylcytidine-3'-phosphate
  modified_base 5: mod_base = OTHER; note = 2'-O-methylcytidine-3'-phosphate
  modified_base 6: mod_base = OTHER; note = 2'-O-methyluridine-3'-phosphate
  modified_base 7: mod_base = OTHER; note = Thymidine-glycol nucleic acid (GNA), S-Isomer
  modified_base 8: mod_base = OTHER; note = 2'-O-methyluridine-3'-phosphate
  modified_base 9: mod_base = OTHER; note = 2'-O-methylguanosine-3'-phosphate
  modified_base 10: mod_base = OTHER; note = 2'-O-methylcytidine-3'-phosphate
  modified_base 11: mod_base = OTHER; note = 2'-O-methylcytidine-3'-phosphate
  modified_base 12: mod_base = OTHER; note = 2'-O-methylcytidine-3'-phosphate
  modified_base 13: mod_base = OTHER; note = 2'-O-methyladenosine-3'-phosphate
  modified_base 14: mod_base = OTHER; note = 2'-deoxy-2'-fluoroadenosine-3'-phosphate
  modified_base 15: mod_base = OTHER; note = 2'-O-methylguanosine-3'-phosphate
  modified_base 16: mod_base = OTHER; note = 2'-deoxy-2'-fluorouridine-3'-phosphate
  modified_base 17: mod_base = OTHER; note = 2'-O-methylcytidine-3'-phosphate
  modified_base 18: mod_base = OTHER; note = 2'-O-methyladenosine-3'-phosphate
  modified_base 19: mod_base = OTHER; note = 2'-O-methyluridine-3'-phosphate
  modified_base 20: mod_base = OTHER; note = 2'-O-methylcytidine-3'-phosphate
  modified_base 21: mod_base = OTHER; note = 2'-O-methyluridine-3'-phosphorothioate
  modified_base 22: mod_base = OTHER; note = 2'-O-methylguanosine-3'-phosphorothioate
  modified_base 23: mod_base = OTHER; note = 2'-O-methylcytidine
acacctttgcccaagtcatctgc

SEQ ID NO: 946 - RNA, 23 nt, synthetic construct
  source 1..23: mol_type = other RNA
  modified_base 1: mod_base = OTHER; note = 2'-O-methyluridine-3'-phosphorothioate
  modified_base 2: mod_base = OTHER; note = 2'-deoxy-2'-fluorocytidine-3'-phosphorothioate
  modified_base 3: mod_base = OTHER; note = 2'-O-methylcytidine-3'-phosphate
  modified_base 4: mod_base = OTHER; note = 2'-O-methyladenosine-3'-phosphate
  modified_base 5: mod_base = OTHER; note = 2'-O-methylcytidine-3'-phosphate
  modified_base 6: mod_base = OTHER; note = 2'-O-methylcytidine-3'-phosphate
  modified_base 7: mod_base = OTHER; note = Thymidine-glycol nucleic acid (GNA), S-Isomer
  modified_base 8: mod_base = OTHER; note = 2'-O-methyluridine-3'-phosphate
  modified_base 9: mod_base = OTHER; note = 2'-O-methyluridine-3'-phosphate
  modified_base 10: mod_base = OTHER; note = 2'-O-methylguanosine-3'-phosphate
  modified_base 11: mod_base = OTHER; note = 2'-O-methylcytidine-3'-phosphate
  modified_base 12: mod_base = OTHER; note = 2'-O-methylcytidine-3'-phosphate
  modified_base 13: mod_base = OTHER; note = 2'-O-methylcytidine-3'-phosphate
  modified_base 14: mod_base = OTHER; note = 2'-deoxy-2'-fluoroadenosine-3'-phosphate
  modified_base 15: mod_base = OTHER; note = 2'-O-methyladenosine-3'-phosphate
  modified_base 16: mod_base = OTHER; note = 2'-deoxy-2'-fluoroguanosine-3'-phosphate
  modified_base 17: mod_base = OTHER; note = 2'-O-methyluridine-3'-phosphate
  modified_base 18: mod_base = OTHER; note = 2'-O-methylcytidine-3'-phosphate
  modified_base 19: mod_base = OTHER; note = 2'-O-methyladenosine-3'-phosphate
  modified_base 20: mod_base = OTHER; note = 2'-O-methyluridine-3'-phosphate
  modified_base 21: mod_base = OTHER; note = 2'-O-methylcytidine-3'-phosphorothioate
  modified_base 22: mod_base = OTHER; note = 2'-O-methyluridine-3'-phosphorothioate
  modified_base 23: mod_base = OTHER; note = 2'-O-methylguanosine
tccacctttgcccaagtcatctg

SEQ ID NO: 947 - RNA, 23 nt, synthetic construct
  source 1..23: mol_type = other RNA
  modified_base 1: mod_base = OTHER; note = 2'-O-methyluridine-3'-phosphorothioate
  modified_base 2: mod_base = OTHER; note = 2'-deoxy-2'-fluorouridine-3'-phosphorothioate
  modified_base 3: mod_base = OTHER; note = 2'-O-methylcytidine-3'-phosphate
  modified_base 4: mod_base = OTHER; note = 2'-O-methylcytidine-3'-phosphate
  modified_base 5: mod_base = OTHER; note = 2'-O-methyladenosine-3'-phosphate
  modified_base 6: mod_base = OTHER; note = 2'-O-methylcytidine-3'-phosphate
  modified_base 7: mod_base = OTHER; note = Cytidine-glycol nucleic acid (GNA), S-isomer
  modified_base 8: mod_base = OTHER; note = 2'-O-methyluridine-3'-phosphate
  modified_base 9: mod_base = OTHER; note = 2'-O-methyluridine-3'-phosphate
  modified_base 10: mod_base = OTHER; note = 2'-O-methyluridine-3'-phosphate
  modified_base 11: mod_base = OTHER; note = 2'-O-methylguanosine-3'-phosphate
  modified_base 12: mod_base = OTHER; note = 2'-O-methylcytidine-3'-phosphate
  modified_base 13: mod_base = OTHER; note = 2'-O-methylcytidine-3'-phosphate
  modified_base 14: mod_base = OTHER; note = 2'-deoxy-2'-fluorocytidine-3'-phosphate
  modified_base 15: mod_base = OTHER; note = 2'-O-methyladenosine-3'-phosphate
  modified_base 16: mod_base = OTHER; note = 2'-deoxy-2'-fluoroadenosine-3'-phosphate
  modified_base 17: mod_base = OTHER; note = 2'-O-methylguanosine-3'-phosphate
  modified_base 18: mod_base = OTHER; note = 2'-O-methyluridine-3'-phosphate
  modified_base 19: mod_base = OTHER; note = 2'-O-methylcytidine-3'-phosphate
  modified_base 20: mod_base = OTHER; note = 2'-O-methyladenosine-3'-phosphate
  modified_base 21: mod_base = OTHER; note = 2'-O-methyluridine-3'-phosphorothioate
  modified_base 22: mod_base = OTHER; note = 2'-O-methylcytidine-3'-phosphorothioate
  modified_base 23: mod_base = OTHER; note = 2'-O-methyluridine
ttccacctttgcccaagtcatct

SEQ ID NO: 948 - RNA, 23 nt, synthetic construct
  source 1..23: mol_type = other RNA
  modified_base 1: mod_base = OTHER; note = 2'-O-methyluridine-3'-phosphorothioate
  modified_base 2: mod_base = OTHER; note = 2'-deoxy-2'-fluorouridine-3'-phosphorothioate
  modified_base 3: mod_base = OTHER; note = 2'-O-methyluridine-3'-phosphate
  modified_base 4: mod_base = OTHER; note = 2'-O-methylcytidine-3'-phosphate
  modified_base 5: mod_base = OTHER; note = 2'-O-methylcytidine-3'-phosphate
  modified_base 6: mod_base = OTHER; note = 2'-O-methyladenosine-3'-phosphate
  modified_base 7: mod_base = OTHER; note = Cytidine-glycol nucleic acid (GNA), S-isomer
  modified_base 8: mod_base = OTHER; note = 2'-O-methylcytidine-3'-phosphate
  modified_base 9: mod_base = OTHER; note = 2'-O-methyluridine-3'-phosphate
  modified_base 10: mod_base = OTHER; note = 2'-O-methyluridine-3'-phosphate
  modified_base 11: mod_base = OTHER; note = 2'-O-methyluridine-3'-phosphate
  modified_base 12: mod_base = OTHER; note = 2'-O-methylguanosine-3'-phosphate
  modified_base 13: mod_base = OTHER; note = 2'-O-methylcytidine-3'-phosphate
  modified_base 14: mod_base = OTHER; note = 2'-deoxy-2'-fluorocytidine-3'-phosphate
  modified_base 15: mod_base = OTHER; note = 2'-O-methylcytidine-3'-phosphate
  modified_base 16: mod_base = OTHER; note = 2'-deoxy-2'-fluoroadenosine-3'-phosphate
  modified_base 17: mod_base = OTHER; note = 2'-O-methyladenosine-3'-phosphate
  modified_base 18: mod_base = OTHER; note = 2'-O-methylguanosine-3'-phosphate
  modified_base 19: mod_base = OTHER; note = 2'-O-methyluridine-3'-phosphate
  modified_base 20: mod_base = OTHER; note = 2'-O-methylcytidine-3'-phosphate
  modified_base 21: mod_base = OTHER; note = 2'-O-methyladenosine-3'-phosphorothioate
  modified_base 22: mod_base = OTHER; note = 2'-O-methyluridine-3'-phosphorothioate
  modified_base 23: mod_base = OTHER; note = 2'-O-methylcytidine
tttccacctttgcccaagtcatc

SEQ ID NO: 949 - RNA, 23 nt, synthetic construct
  source 1..23: mol_type = other RNA
  modified_base 1: mod_base = OTHER; note = 2'-O-methyladenosine-3'-phosphorothioate
  modified_base 2: mod_base = OTHER; note = 2'-deoxy-2'-fluorouridine-3'-phosphorothioate
  modified_base 3: mod_base = OTHER; note = 2'-O-methyluridine-3'-phosphate
  modified_base 4: mod_base = OTHER; note = 2'-O-methyluridine-3'-phosphate
  modified_base 5: mod_base = OTHER; note = 2'-O-methylcytidine-3'-phosphate
  modified_base 6: mod_base = OTHER; note = 2'-O-methylcytidine-3'-phosphate
  modified_base 7: mod_base = OTHER; note = Adenosine-glycol nucleic acid (GNA), S-isomer
  modified_base 8: mod_base = OTHER; note = 2'-O-methylcytidine-3'-phosphate
  modified_base 9: mod_base = OTHER; note = 2'-O-methylcytidine-3'-phosphate
  modified_base 10: mod_base = OTHER; note = 2'-O-methyluridine-3'-phosphate
  modified_base 11: mod_base = OTHER; note = 2'-O-methyluridine-3'-phosphate
  modified_base 12: mod_base = OTHER; note = 2'-O-methyluridine-3'-phosphate
  modified_base 13: mod_base = OTHER; note = 2'-O-methylguanosine-3'-phosphate
  modified_base 14: mod_base = OTHER; note = 2'-deoxy-2'-fluorocytidine-3'-phosphate
  modified_base 15: mod_base = OTHER; note = 2'-O-methylcytidine-3'-phosphate
  modified_base 16: mod_base = OTHER; note = 2'-deoxy-2'-fluorocytidine-3'-phosphate
  modified_base 17: mod_base = OTHER; note = 2'-O-methyladenosine-3'-phosphate
  modified_base 18: mod_base = OTHER; note = 2'-O-methyladenosine-3'-phosphate
  modified_base 19: mod_base = OTHER; note = 2'-O-methylguanosine-3'-phosphate
  modified_base 20: mod_base = OTHER; note = 2'-O-methyluridine-3'-phosphate
  modified_base 21: mod_base = OTHER; note = 2'-O-methylcytidine-3'-phosphorothioate
  modified_base 22: mod_base = OTHER; note = 2'-O-methyladenosine-3'-phosphorothioate
  modified_base 23: mod_base = OTHER; note = 2'-O-methyluridine
atttccacctttgcccaagtcat

SEQ ID NO: 950 - RNA, 23 nt, synthetic construct
  source 1..23: mol_type = other RNA
  modified_base 1: mod_base = OTHER; note = 2'-O-methyladenosine-3'-phosphorothioate
  modified_base 2: mod_base = OTHER; note = 2'-deoxy-2'-fluoroadenosine-3'-phosphorothioate
  modified_base 3: mod_base = OTHER; note = 2'-O-methyluridine-3'-phosphate
  modified_base 4: mod_base = OTHER; note = 2'-O-methyluridine-3'-phosphate
  modified_base 5: mod_base = OTHER; note = 2'-O-methyluridine-3'-phosphate
  modified_base 6: mod_base = OTHER; note = 2'-O-methylcytidine-3'-phosphate
  modified_base 7: mod_base = OTHER; note = Cytidine-glycol nucleic acid (GNA), S-isomer
  modified_base 8: mod_base = OTHER; note = 2'-O-methyladenosine-3'-phosphate
  modified_base 9: mod_base = OTHER; note = 2'-O-methylcytidine-3'-phosphate
  modified_base 10: mod_base = OTHER; note = 2'-O-methylcytidine-3'-phosphate
  modified_base 11: mod_base = OTHER; note = 2'-O-methyluridine-3'-phosphate
  modified_base 12: mod_base = OTHER; note = 2'-O-methyluridine-3'-phosphate
  modified_base 13: mod_base = OTHER; note = 2'-O-methyluridine-3'-phosphate
  modified_base 14: mod_base = OTHER; note = 2'-deoxy-2'-fluoroguanosine-3'-phosphate
  modified_base 15: mod_base = OTHER; note = 2'-O-methylcytidine-3'-phosphate
  modified_base 16: mod_base = OTHER; note = 2'-deoxy-2'-fluorocytidine-3'-phosphate
  modified_base 17: mod_base = OTHER; note = 2'-O-methylcytidine-3'-phosphate
  modified_base 18: mod_base = OTHER; note = 2'-O-methyladenosine-3'-phosphate
  modified_base 19: mod_base = OTHER; note = 2'-O-methyladenosine-3'-phosphate
  modified_base 20: mod_base = OTHER; note = 2'-O-methylguanosine-3'-phosphate
  modified_base 21: mod_base = OTHER; note = 2'-O-methyluridine-3'-phosphorothioate
  modified_base 22: mod_base = OTHER; note = 2'-O-methylcytidine-3'-phosphorothioate
  modified_base 23: mod_base = OTHER; note = 2'-O-methyladenosine
aatttccacctttgcccaagtca

SEQ ID NO: 951 - RNA, 23 nt, synthetic construct
  source 1..23: mol_type = other RNA
  modified_base 1: mod_base = OTHER; note = 2'-O-methyluridine-3'-phosphorothioate
  modified_base 2: mod_base = OTHER; note = 2'-deoxy-2'-fluorouridine-3'-phosphorothioate
  modified_base 3: mod_base = OTHER; note = 2'-O-methylcytidine-3'-phosphate
  modified_base 4: mod_base = OTHER; note = 2'-O-methyladenosine-3'-phosphate
  modified_base 5: mod_base = OTHER; note = 2'-O-methyluridine-3'-phosphate
  modified_base 6: mod_base = OTHER; note = 2'-O-methyluridine-3'-phosphate
  modified_base 7: mod_base = OTHER; note = Thymidine-glycol nucleic acid (GNA), S-Isomer
  modified_base 8: mod_base = OTHER; note = 2'-O-methylcytidine-3'-phosphate
  modified_base 9: mod_base = OTHER; note = 2'-O-methylcytidine-3'-phosphate
  modified_base 10: mod_base = OTHER; note = 2'-O-methyladenosine-3'-phosphate
  modified_base 11: mod_base = OTHER; note = 2'-O-methylcytidine-3'-phosphate
  modified_base 12: mod_base = OTHER; note = 2'-O-methylcytidine-3'-phosphate
  modified_base 13: mod_base = OTHER; note = 2'-O-methyluridine-3'-phosphate
  modified_base 14: mod_base = OTHER; note = 2'-deoxy-2'-fluorouridine-3'-phosphate
  modified_base 15: mod_base = OTHER; note = 2'-O-methyluridine-3'-phosphate
  modified_base 16: mod_base = OTHER; note = 2'-deoxy-2'-fluoroguanosine-3'-phosphate
  modified_base 17: mod_base = OTHER; note = 2'-O-methylcytidine-3'-phosphate
  modified_base 18: mod_base = OTHER; note = 2'-O-methylcytidine-3'-phosphate
  modified_base 19: mod_base = OTHER; note = 2'-O-methylcytidine-3'-phosphate
  modified_base 20: mod_base = OTHER; note = 2'-O-methyladenosine-3'-phosphate
  modified_base 21: mod_base = OTHER; note = 2'-O-methyladenosine-3'-phosphorothioate
  modified_base 22: mod_base = OTHER; note = 2'-O-methylguanosine-3'-phosphorothioate
  modified_base 23: mod_base = OTHER; note = 2'-O-methyluridine
ttcatttccacctttgcccaagt

SEQ ID NO: 952 - RNA, 23 nt, synthetic construct
  source 1..23: mol_type = other RNA
  modified_base 1: mod_base = OTHER; note = 2'-O-methyluridine-3'-phosphorothioate
  modified_base 2: mod_base = OTHER; note = 2'-deoxy-2'-fluoroadenosine-3'-phosphorothioate
  modified_base 3: mod_base = OTHER; note = 2'-O-methylcytidine-3'-phosphate
  modified_base 4: mod_base = OTHER; note = 2'-O-methyluridine-3'-phosphate
  modified_base 5: mod_base = OTHER; note = 2'-O-methyluridine-3'-phosphate
  modified_base 6: mod_base = OTHER; note = 2'-O-methyluridine-3'-phosphate
  modified_base 7: mod_base = OTHER; note = Cytidine-glycol nucleic acid (GNA), S-isomer
  modified_base 8: mod_base = OTHER; note = 2'-O-methyluridine-3'-phosphate
  modified_base 9: mod_base = OTHER; note = 2'-O-methyluridine-3'-phosphate
  modified_base 10: mod_base = OTHER; note = 2'-O-methylcytidine-3'-phosphate
  modified_base 11: mod_base = OTHER; note = 2'-O-methyladenosine-3'-phosphate
  modified_base 12: mod_base = OTHER; note = 2'-O-methyluridine-3'-phosphate
  modified_base 13: mod_base = OTHER; note = 2'-O-methyluridine-3'-phosphate
  modified_base 14: mod_base = OTHER; note = 2'-deoxy-2'-fluorouridine-3'-phosphate
  modified_base 15: mod_base = OTHER; note = 2'-O-methylcytidine-3'-phosphate
  modified_base 16: mod_base = OTHER; note = 2'-deoxy-2'-fluorocytidine-3'-phosphate
  modified_base 17: mod_base = OTHER; note = 2'-O-methyladenosine-3'-phosphate
  modified_base 18: mod_base = OTHER; note = 2'-O-methylcytidine-3'-phosphate
  modified_base 19: mod_base = OTHER; note = 2'-O-methylcytidine-3'-phosphate
  modified_base 20: mod_base = OTHER; note = 2'-O-methyluridine-3'-phosphate
  modified_base 21: mod_base = OTHER; note = 2'-O-methyluridine-3'-phosphorothioate
  modified_base 22: mod_base = OTHER; note = 2'-O-methyluridine-3'-phosphorothioate
  modified_base 23: mod_base = OTHER; note = 2'-O-methylguanosine
tactttcttcatttccacctttg

SEQ ID NO: 953 - RNA, 23 nt, synthetic construct
  source 1..23: mol_type = other RNA
  modified_base 1: mod_base = OTHER; note = 2'-O-methyladenosine-3'-phosphorothioate
  modified_base 2: mod_base = OTHER; note = 2'-deoxy-2'-fluorouridine-3'-phosphorothioate
  modified_base 3: mod_base = OTHER; note = 2'-O-methyladenosine-3'-phosphate
  modified_base 4: mod_base = OTHER; note = 2'-O-methylcytidine-3'-phosphate
  modified_base 5: mod_base = OTHER; note = 2'-O-methyluridine-3'-phosphate
  modified_base 6: mod_base = OTHER; note = 2'-O-methyluridine-3'-phosphate
  modified_base 7: mod_base = OTHER; note = Thymidine-glycol nucleic acid (GNA), S-Isomer
  modified_base 8: mod_base = OTHER; note = 2'-O-methylcytidine-3'-phosphate
  modified_base 9: mod_base = OTHER; note = 2'-O-methyluridine-3'-phosphate
  modified_base 10: mod_base = OTHER; note = 2'-O-methyluridine-3'-phosphate
  modified_base 11: mod_base = OTHER; note = 2'-O-methylcytidine-3'-phosphate
  modified_base 12: mod_base = OTHER; note = 2'-O-methyladenosine-3'-phosphate
  modified_base 13: mod_base = OTHER; note = 2'-O-methyluridine-3'-phosphate
  modified_base 14: mod_base = OTHER; note = 2'-deoxy-2'-fluorouridine-3'-phosphate
  modified_base 15: mod_base = OTHER; note = 2'-O-methyluridine-3'-phosphate
  modified_base 16: mod_base = OTHER; note = 2'-deoxy-2'-fluorocytidine-3'-phosphate
  modified_base 17: mod_base = OTHER; note = 2'-O-methylcytidine-3'-phosphate
  modified_base 18: mod_base = OTHER; note = 2'-O-methyladenosine-3'-phosphate
  modified_base 19: mod_base = OTHER; note = 2'-O-methylcytidine-3'-phosphate
  modified_base 20: mod_base = OTHER; note = 2'-O-methylcytidine-3'-phosphate
  modified_base 21: mod_base = OTHER; note = 2'-O-methyluridine-3'-phosphorothioate
  modified_base 22: mod_base = OTHER; note = 2'-O-methyluridine-3'-phosphorothioate
  modified_base 23: mod_base = OTHER; note = 2'-O-methyluridine
atactttcttcatttccaccttt

SEQ ID NO: 954 - RNA, 23 nt, synthetic construct
  source 1..23: mol_type = other RNA
  modified_base 1: mod_base = OTHER; note = 2'-O-methyladenosine-3'-phosphorothioate
  modified_base 2: mod_base = OTHER; note = 2'-deoxy-2'-fluorouridine-3'-phosphorothioate
  modified_base 3: mod_base = OTHER; note = 2'-O-methyluridine-3'-phosphate
  modified_base 4: mod_base = OTHER; note = 2'-O-methyluridine-3'-phosphate
  modified_base 5: mod_base = OTHER; note = 2'-O-methylcytidine-3'-phosphate
  modified_base 6: mod_base = OTHER; note = 2'-O-methylcytidine-3'-phosphate
  modified_base 7: mod_base = OTHER; note = Thymidine-glycol nucleic acid (GNA), S-Isomer
  modified_base 8: mod_base = OTHER; note = 2'-O-methylguanosine-3'-phosphate
  modified_base 9: mod_base = OTHER; note = 2'-O-methyluridine-3'-phosphate
  modified_base 10: mod_base = OTHER; note = 2'-O-methylcytidine-3'-phosphate
  modified_base 11: mod_base = OTHER; note = 2'-O-methyluridine-3'-phosphate
  modified_base 12: mod_base = OTHER; note = 2'-O-methyluridine-3'-phosphate
  modified_base 13: mod_base = OTHER; note = 2'-O-methyluridine-3'-phosphate
  modified_base 14: mod_base = OTHER; note = 2'-deoxy-2'-fluoroguanosine-3'-phosphate
  modified_base 15: mod_base = OTHER; note = 2'-O-methyluridine-3'-phosphate
  modified_base 16: mod_base = OTHER; note = 2'-deoxy-2'-fluoroadenosine-3'-phosphate
  modified_base 17: mod_base = OTHER; note = 2'-O-methylcytidine-3'-phosphate
  modified_base 18: mod_base = OTHER; note = 2'-O-methyluridine-3'-phosphate
  modified_base 19: mod_base = OTHER; note = 2'-O-methyluridine-3'-phosphate
  modified_base 20: mod_base = OTHER; note = 2'-O-methyluridine-3'-phosphate
  modified_base 21: mod_base = OTHER; note = 2'-O-methylcytidine-3'-phosphorothioate
  modified_base 22: mod_base = OTHER; note = 2'-O-methyluridine-3'-phosphorothioate
  modified_base 23: mod_base = OTHER; note = 2'-O-methyluridine
atttcctgtctttgtactttctt

SEQ ID NO: 955 - RNA, 23 nt, synthetic construct
  source 1..23: mol_type = other RNA
  modified_base 1: mod_base = OTHER; note = 2'-O-methyladenosine-3'-phosphorothioate
  modified_base 2: mod_base = OTHER; note = 2'-deoxy-2'-fluoroguanosine-3'-phosphorothioate
  modified_base 3: mod_base = OTHER; note = 2'-O-methyluridine-3'-phosphate
  modified_base 4: mod_base = OTHER; note = 2'-O-methyluridine-3'-phosphate
  modified_base 5: mod_base = OTHER; note = 2'-O-methyluridine-3'-phosphate
  modified_base 6: mod_base = OTHER; note = 2'-O-methylcytidine-3'-phosphate
  modified_base 7: mod_base = OTHER; note = Cytidine-glycol nucleic acid (GNA), S-isomer
  modified_base 8: mod_base = OTHER; note = 2'-O-methyluridine-3'-phosphate
  modified_base 9: mod_base = OTHER; note = 2'-O-methylguanosine-3'-phosphate
  modified_base 10: mod_base = OTHER; note = 2'-O-methyluridine-3'-phosphate
  modified_base 11: mod_base = OTHER; note = 2'-O-methylcytidine-3'-phosphate
  modified_base 12: mod_base = OTHER; note = 2'-O-methyluridine-3'-phosphate
  modified_base 13: mod_base = OTHER; note = 2'-O-methyluridine-3'-phosphate
  modified_base 14: mod_base = OTHER; note = 2'-deoxy-2'-fluorouridine-3'-phosphate
  modified_base 15: mod_base = OTHER; note = 2'-O-methylguanosine-3'-phosphate
  modified_base 16: mod_base = OTHER; note = 2'-deoxy-2'-fluorouridine-3'-phosphate
  modified_base 17: mod_base = OTHER; note = 2'-O-methyladenosine-3'-phosphate
  modified_base 18: mod_base = OTHER; note = 2'-O-methylcytidine-3'-phosphate
  modified_base 19: mod_base = OTHER; note = 2'-O-methyluridine-3'-phosphate
  modified_base 20: mod_base = OTHER; note = 2'-O-methyluridine-3'-phosphate
  modified_base 21: mod_base = OTHER; note = 2'-O-methyluridine-3'-phosphorothioate
  modified_base 22: mod_base = OTHER; note = 2'-O-methylcytidine-3'-phosphorothioate
  modified_base 23: mod_base = OTHER; note = 2'-O-methyluridine
agtttcctgtctttgtactttct

SEQ ID NO: 956 - RNA, 23 nt, synthetic construct
  source 1..23: mol_type = other RNA
  modified_base 1: mod_base = OTHER; note = 2'-O-methyladenosine-3'-phosphorothioate
  modified_base 2: mod_base = OTHER; note = 2'-deoxy-2'-fluorocytidine-3'-phosphorothioate
  modified_base 3: mod_base = OTHER; note = 2'-O-methylguanosine-3'-phosphate
  modified_base 4: mod_base = OTHER; note = 2'-O-methyluridine-3'-phosphate
  modified_base 5: mod_base = OTHER; note = 2'-O-methyluridine-3'-phosphate
  modified_base 6: mod_base = OTHER; note = 2'-O-methyluridine-3'-phosphate
  modified_base 7: mod_base = OTHER; note = Cytidine-glycol nucleic acid (GNA), S-isomer
  modified_base 8: mod_base = OTHER; note = 2'-O-methylcytidine-3'-phosphate
  modified_base 9: mod_base = OTHER; note = 2'-O-methyluridine-3'-phosphate
  modified_base 10: mod_base = OTHER; note = 2'-O-methylguanosine-3'-phosphate
  modified_base 11: mod_base = OTHER; note = 2'-O-methyluridine-3'-phosphate
  modified_base 12: mod_base = OTHER; note = 2'-O-methylcytidine-3'-phosphate
  modified_base 13: mod_base = OTHER; note = 2'-O-methyluridine-3'-phosphate
  modified_base 14: mod_base = OTHER; note = 2'-deoxy-2'-fluorouridine-3'-phosphate
  modified_base 15: mod_base = OTHER; note = 2'-O-methyluridine-3'-phosphate
  modified_base 16: mod_base = OTHER; note = 2'-deoxy-2'-fluoroguanosine-3'-phosphate
  modified_base 17: mod_base = OTHER; note = 2'-O-methyluridine-3'-phosphate
  modified_base 18: mod_base = OTHER; note = 2'-O-methyladenosine-3'-phosphate
  modified_base 19: mod_base = OTHER; note = 2'-O-methylcytidine-3'-phosphate
  modified_base 20: mod_base = OTHER; note = 2'-O-methyluridine-3'-phosphate
  modified_base 21: mod_base = OTHER; note = 2'-O-methyluridine-3'-phosphorothioate
  modified_base 22: mod_base = OTHER; note = 2'-O-methyluridine-3'-phosphorothioate
  modified_base 23: mod_base = OTHER; note = 2'-O-methylcytidine
acgtttcctgtctttgtactttc

SEQ ID NO: 957 - RNA, 23 nt, synthetic construct
  source 1..23: mol_type = other RNA
  modified_base 1: mod_base = OTHER; note = 2'-O-methyladenosine-3'-phosphorothioate
  modified_base 2: mod_base = OTHER; note = 2'-deoxy-2'-fluoroguanosine-3'-phosphorothioate
  modified_base 3: mod_base = OTHER; note = 2'-O-methylcytidine-3'-phosphate
  modified_base 4: mod_base = OTHER; note = 2'-O-methylguanosine-3'-phosphate
  modified_base 5: mod_base = OTHER; note = 2'-O-methyluridine-3'-phosphate
  modified_base 6: mod_base = OTHER; note = 2'-O-methyluridine-3'-phosphate
  modified_base 7: mod_base = OTHER; note = Thymidine-glycol nucleic acid (GNA), S-Isomer
  modified_base 8: mod_base = OTHER; note = 2'-O-methylcytidine-3'-phosphate
  modified_base 9: mod_base = OTHER; note = 2'-O-methylcytidine-3'-phosphate
  modified_base 10: mod_base = OTHER; note = 2'-O-methyluridine-3'-phosphate
  modified_base 11: mod_base = OTHER; note = 2'-O-methylguanosine-3'-phosphate
  modified_base 12: mod_base = OTHER; note = 2'-O-methyluridine-3'-phosphate
  modified_base 13: mod_base = OTHER; note = 2'-O-methylcytidine-3'-phosphate
  modified_base 14: mod_base = OTHER; note = 2'-deoxy-2'-fluorouridine-3'-phosphate
  modified_base 15: mod_base = OTHER; note = 2'-O-methyluridine-3'-phosphate
  modified_base 16: mod_base = OTHER; note = 2'-deoxy-2'-fluorouridine-3'-phosphate
  modified_base 17: mod_base = OTHER; note = 2'-O-methylguanosine-3'-phosphate
  modified_base 18: mod_base = OTHER; note = 2'-O-methyluridine-3'-phosphate
  modified_base 19: mod_base = OTHER; note = 2'-O-methyladenosine-3'-phosphate
  modified_base 20: mod_base = OTHER; note = 2'-O-methylcytidine-3'-phosphate
  modified_base 21: mod_base = OTHER; note = 2'-O-methyluridine-3'-phosphorothioate
  modified_base 22: mod_base = OTHER; note = 2'-O-methyluridine-3'-phosphorothioate
  modified_base 23: mod_base = OTHER; note = 2'-O-methyluridine
agcgtttcctgtctttgtacttt

SEQ ID NO: 958 - RNA, 23 nt, synthetic construct
  source 1..23: mol_type = other RNA
  modified_base 1: mod_base = OTHER; note = 2'-O-methyladenosine-3'-phosphorothioate
  modified_base 2: mod_base = OTHER; note = 2'-deoxy-2'-fluoroadenosine-3'-phosphorothioate
  modified_base 3: mod_base = OTHER; note = 2'-O-methylguanosine-3'-phosphate
  modified_base 4: mod_base = OTHER; note = 2'-O-methylcytidine-3'-phosphate
  modified_base 5: mod_base = OTHER; note = 2'-O-methylguanosine-3'-phosphate
  modified_base 6: mod_base = OTHER; note = 2'-O-methyluridine-3'-phosphate
  modified_base 7: mod_base = OTHER; note = Thymidine-glycol nucleic acid (GNA), S-Isomer
  modified_base 8: mod_base = OTHER; note = 2'-O-methyluridine-3'-phosphate
  modified_base 9: mod_base = OTHER; note = 2'-O-methylcytidine-3'-phosphate
  modified_base 10: mod_base = OTHER; note = 2'-O-methylcytidine-3'-phosphate
  modified_base 11: mod_base = OTHER; note = 2'-O-methyluridine-3'-phosphate
  modified_base 12: mod_base = OTHER; note = 2'-O-methylguanosine-3'-phosphate
  modified_base 13: mod_base = OTHER; note = 2'-O-methyluridine-3'-phosphate
  modified_base 14: mod_base = OTHER; note = 2'-deoxy-2'-fluorocytidine-3'-phosphate
  modified_base 15: mod_base = OTHER; note = 2'-O-methyluridine-3'-phosphate
  modified_base 16: mod_base = OTHER; note = 2'-deoxy-2'-fluorouridine-3'-phosphate
  modified_base 17: mod_base = OTHER; note = 2'-O-methyluridine-3'-phosphate
  modified_base 18: mod_base = OTHER; note = 2'-O-methylguanosine-3'-phosphate
  modified_base 19: mod_base = OTHER; note = 2'-O-methyluridine-3'-phosphate
  modified_base 20: mod_base = OTHER; note = 2'-O-methyladenosine-3'-phosphate
  modified_base 21: mod_base = OTHER; note = 2'-O-methylcytidine-3'-phosphorothioate
  modified_base 22: mod_base = OTHER; note = 2'-O-methyluridine-3'-phosphorothioate
  modified_base 23: mod_base = OTHER; note = 2'-O-methyluridine
aagcgtttcctgtctttgtactt

SEQ ID NO: 959 - RNA, 23 nt, synthetic construct
  source 1..23: mol_type = other RNA
  modified_base 1: mod_base = OTHER; note = 2'-O-methyladenosine-3'-phosphorothioate
  modified_base 2: mod_base = OTHER; note = 2'-deoxy-2'-fluorocytidine-3'-phosphorothioate
  modified_base 3: mod_base = OTHER; note = 2'-O-methyladenosine-3'-phosphate
  modified_base 4: mod_base = OTHER; note = 2'-O-methylguanosine-3'-phosphate
  modified_base 5: mod_base = OTHER; note = 2'-O-methylcytidine-3'-phosphate
  modified_base 6: mod_base = OTHER; note = 2'-O-methylguanosine-3'-phosphate
  modified_base 7: mod_base = OTHER; note = Thymidine-glycol nucleic acid (GNA), S-Isomer
  modified_base 8: mod_base = OTHER; note = 2'-O-methyluridine-3'-phosphate
  modified_base 9: mod_base = OTHER; note = 2'-O-methyluridine-3'-phosphate
  modified_base 10: mod_base = OTHER; note = 2'-O-methylcytidine-3'-phosphate
  modified_base 11: mod_base = OTHER; note = 2'-O-methylcytidine-3'-phosphate
  modified_base 12: mod_base = OTHER; note = 2'-O-methyluridine-3'-phosphate
  modified_base 13: mod_base = OTHER; note = 2'-O-methylguanosine-3'-phosphate
  modified_base 14: mod_base = OTHER; note = 2'-deoxy-2'-fluorouridine-3'-phosphate
  modified_base 15: mod_base = OTHER; note = 2'-O-methylcytidine-3'-phosphate
  modified_base 16: mod_base = OTHER; note = 2'-deoxy-2'-fluorouridine-3'-phosphate
  modified_base 17: mod_base = OTHER; note = 2'-O-methyluridine-3'-phosphate
  modified_base 18: mod_base = OTHER; note = 2'-O-methyluridine-3'-phosphate
  modified_base 19: mod_base = OTHER; note = 2'-O-methylguanosine-3'-phosphate
  modified_base 20: mod_base = OTHER; note = 2'-O-methyluridine-3'-phosphate
  modified_base 21: mod_base = OTHER; note = 2'-O-methyladenosine-3'-phosphorothioate
  modified_base 22: mod_base = OTHER; note = 2'-O-methylcytidine-3'-phosphorothioate
  modified_base 23: mod_base = OTHER; note = 2'-O-methyluridine
acagcgtttcctgtctttgtact

SEQ ID NO: 960 - RNA, 23 nt, synthetic construct
  source 1..23: mol_type = other RNA
  modified_base 1: mod_base = OTHER; note = 2'-O-methyluridine-3'-phosphorothioate
  modified_base 2: mod_base = OTHER; note = 2'-deoxy-2'-fluorouridine-3'-phosphorothioate
  modified_base 3: mod_base = OTHER; note = 2'-O-methylcytidine-3'-phosphate
  modified_base 4: mod_base = OTHER; note = 2'-O-methylcytidine-3'-phosphate
  modified_base 5: mod_base = OTHER; note = 2'-O-methyladenosine-3'-phosphate
  modified_base 6: mod_base = OTHER; note = 2'-O-methylguanosine-3'-phosphate
  modified_base 7: mod_base = OTHER; note = Cytidine-glycol nucleic acid (GNA), S-isomer
  modified_base 8: mod_base = OTHER; note = 2'-O-methylguanosine-3'-phosphate
  modified_base 9: mod_base = OTHER; note = 2'-O-methyluridine-3'-phosphate
  modified_base 10: mod_base = OTHER; note = 2'-O-methyluridine-3'-phosphate
  modified_base 11: mod_base = OTHER; note = 2'-O-methyluridine-3'-phosphate
  modified_base 12: mod_base = OTHER; note = 2'-O-methylcytidine-3'-phosphate
  modified_base 13: mod_base = OTHER; note = 2'-O-methylcytidine-3'-phosphate
  modified_base 14: mod_base = OTHER; note = 2'-deoxy-2'-fluorouridine-3'-phosphate
  modified_base 15: mod_base = OTHER; note = 2'-O-methylguanosine-3'-phosphate
  modified_base 16: mod_base = OTHER; note = 2'-deoxy-2'-fluorouridine-3'-phosphate
  modified_base 17: mod_base = OTHER; note = 2'-O-methylcytidine-3'-phosphate
  modified_base 18: mod_base = OTHER; note = 2'-O-methyluridine-3'-phosphate
  modified_base 19: mod_base = OTHER; note = 2'-O-methyluridine-3'-phosphate
  modified_base 20: mod_base = OTHER; note = 2'-O-methyluridine-3'-phosphate
  modified_base 21: mod_base = OTHER; note = 2'-O-methylguanosine-3'-phosphorothioate
  modified_base 22: mod_base = OTHER; note = 2'-O-methyluridine-3'-phosphorothioate
  modified_base 23: mod_base = OTHER; note = 2'-O-methyladenosine
ttccagcgtttcctgtctttgta

SEQ ID NO: 961 - RNA, 23 nt, synthetic construct
  source 1..23: mol_type = other RNA
  modified_base 1: mod_base = OTHER; note = 2'-O-methyluridine-3'-phosphorothioate
  modified_base 2: mod_base = OTHER; note = 2'-deoxy-2'-fluorouridine-3'-phosphorothioate
  modified_base 3: mod_base = OTHER; note = 2'-O-methyladenosine-3'-phosphate
  modified_base 4: mod_base = OTHER; note = 2'-O-methylcytidine-3'-phosphate
  modified_base 5: mod_base = OTHER; note = 2'-O-methyladenosine-3'-phosphate
  modified_base 6: mod_base = OTHER; note = 2'-O-methylcytidine-3'-phosphate
  modified_base 7: mod_base = OTHER; note = Cytidine-glycol nucleic acid (GNA), S-isomer
  modified_base 8: mod_base = OTHER; note = 2'-O-methyladenosine-3'-phosphate
  modified_base 9: mod_base = OTHER; note = 2'-O-methylcytidine-3'-phosphate
  modified_base 10: mod_base = OTHER; note = 2'-O-methyladenosine-3'-phosphate
  modified_base 11: mod_base = OTHER; note = 2'-O-methyladenosine-3'-phosphate
  modified_base 12: mod_base = OTHER; note = 2'-O-methylguanosine-3'-phosphate
  modified_base 13: mod_base = OTHER; note = 2'-O-methylcytidine-3'-phosphate
  modified_base 14: mod_base = OTHER; note = 2'-deoxy-2'-fluorocytidine-3'-phosphate
  modified_base 15: mod_base = OTHER; note = 2'-O-methyladenosine-3'-phosphate
  modified_base 16: mod_base = OTHER; note = 2'-deoxy-2'-fluoroadenosine-3'-phosphate
  modified_base 17: mod_base = OTHER; note = 2'-O-methyladenosine-3'-phosphate
  modified_base 18: mod_base = OTHER; note = 2'-O-methylcytidine-3'-phosphate
  modified_base 19: mod_base = OTHER; note = 2'-O-methylguanosine-3'-phosphate
  modified_base 20: mod_base = OTHER; note = 2'-O-methyladenosine-3'-phosphate
  modified_base 21: mod_base = OTHER; note = 2'-O-methylcytidine-3'-phosphorothioate
  modified_base 22: mod_base = OTHER; note = 2'-O-methyluridine-3'-phosphorothioate
  modified_base 23: mod_base = OTHER; note = 2'-O-methyluridine
ttacaccacaagccaaacgactt

SEQ ID NO: 962 - RNA, 23 nt, synthetic construct
  source 1..23: mol_type = other RNA
  modified_base 1: mod_base = OTHER; note = 2'-O-methyladenosine-3'-phosphorothioate
  modified_base 2: mod_base = OTHER; note = 2'-deoxy-2'-fluorouridine-3'-phosphorothioate
  modified_base 3: mod_base = OTHER; note = 2'-O-methyluridine-3'-phosphate
  modified_base 4: mod_base = OTHER; note = 2'-O-methyladenosine-3'-phosphate
  modified_base 5: mod_base = OTHER; note = 2'-O-methylcytidine-3'-phosphate
  modified_base 6: mod_base = OTHER; note = 2'-O-methyladenosine-3'-phosphate
  modified_base 7: mod_base = OTHER; note = Cytidine-glycol nucleic acid (GNA), S-isomer
  modified_base 8: mod_base = OTHER; note = 2'-O-methylcytidine-3'-phosphate
  modified_base 9: mod_base = OTHER; note = 2'-O-methyladenosine-3'-phosphate
  modified_base 10: mod_base = OTHER; note = 2'-O-methylcytidine-3'-phosphate
  modified_base 11: mod_base = OTHER; note = 2'-O-methyladenosine-3'-phosphate
  modified_base 12: mod_base = OTHER; note = 2'-O-methyladenosine-3'-phosphate
  modified_base 13: mod_base = OTHER; note = 2'-O-methylguanosine-3'-phosphate
  modified_base 14: mod_base = OTHER; note = 2'-deoxy-2'-fluorocytidine-3'-phosphate
  modified_base 15: mod_base = OTHER; note = 2'-O-methylcytidine-3'-phosphate
  modified_base 16: mod_base = OTHER; note = 2'-deoxy-2'-fluoroadenosine-3'-phosphate
  modified_base 17: mod_base = OTHER; note = 2'-O-methyladenosine-3'-phosphate
  modified_base 18: mod_base = OTHER; note = 2'-O-methyladenosine-3'-phosphate
  modified_base 19: mod_base = OTHER; note = 2'-O-methylcytidine-3'-phosphate
  modified_base 20: mod_base = OTHER; note = 2'-O-methylguanosine-3'-phosphate
  modified_base 21: mod_base = OTHER; note = 2'-O-methyladenosine-3'-phosphorothioate
  modified_base 22: mod_base = OTHER; note = 2'-O-methylcytidine-3'-phosphorothioate
  modified_base 23: mod_base = OTHER; note = 2'-O-methyluridine
attacaccacaagccaaacgact

SEQ ID NO: 963 - RNA, 23 nt, synthetic construct
  source 1..23: mol_type = other RNA
  modified_base 1: mod_base = OTHER; note = 2'-O-methyladenosine-3'-phosphorothioate
  modified_base 2: mod_base = OTHER; note = 2'-deoxy-2'-fluoroadenosine-3'-phosphorothioate
  modified_base 3: mod_base = OTHER; note = 2'-O-methyluridine-3'-phosphate
  modified_base 4: mod_base = OTHER; note = 2'-O-methyluridine-3'-phosphate
  modified_base 5: mod_base = OTHER; note = 2'-O-methyladenosine-3'-phosphate
  modified_base 6: mod_base = OTHER; note = 2'-O-methylcytidine-3'-phosphate
  modified_base 7: mod_base = OTHER; note = Adenosine-glycol nucleic acid (GNA), S-isomer
  modified_base 8: mod_base = OTHER; note = 2'-O-methylcytidine-3'-phosphate
  modified_base 9: mod_base = OTHER; note = 2'-O-methylcytidine-3'-phosphate
  modified_base 10: mod_base = OTHER; note = 2'-O-methyladenosine-3'-phosphate
  modified_base 11: mod_base = OTHER; note = 2'-O-methylcytidine-3'-phosphate
  modified_base 12: mod_base = OTHER; note = 2'-O-methyladenosine-3'-phosphate
  modified_base 13: mod_base = OTHER; note = 2'-O-methyladenosine-3'-phosphate
  modified_base 14: mod_base = OTHER; note = 2'-deoxy-2'-fluoroguanosine-3'-phosphate
  modified_base 15: mod_base = OTHER; note = 2'-O-methylcytidine-3'-phosphate
  modified_base 16: mod_base = OTHER; note = 2'-deoxy-2'-fluorocytidine-3'-phosphate
  modified_base 17: mod_base = OTHER; note = 2'-O-methyladenosine-3'-phosphate
  modified_base 18: mod_base = OTHER; note = 2'-O-methyladenosine-3'-phosphate
  modified_base 19: mod_base = OTHER; note = 2'-O-methyladenosine-3'-phosphate
  modified_base 20: mod_base = OTHER; note = 2'-O-methylcytidine-3'-phosphate
  modified_base 21: mod_base = OTHER; note = 2'-O-methylguanosine-3'-phosphorothioate
  modified_base 22: mod_base = OTHER; note = 2'-O-methyladenosine-3'-phosphorothioate
  modified_base 23: mod_base = OTHER; note = 2'-O-methylcytidine
aattacaccacaagccaaacgac

SEQ ID NO: 964 - RNA, 23 nt, synthetic construct
  source 1..23: mol_type = other RNA
  modified_base 1: mod_base = OTHER; note = 2'-O-methyladenosine-3'-phosphorothioate
  modified_base 2: mod_base = OTHER; note = 2'-deoxy-2'-fluoroadenosine-3'-phosphorothioate
  modified_base 3: mod_base = OTHER; note = 2'-O-methyladenosine-3'-phosphate
  modified_base 4: mod_base = OTHER; note = 2'-O-methyluridine-3'-phosphate
  modified_base 5: mod_base = OTHER; note = 2'-O-methyluridine-3'-phosphate
  modified_base 6: mod_base = OTHER; note = 2'-O-methyladenosine-3'-phosphate
  modified_base 7: mod_base = OTHER; note = Cytidine-glycol nucleic acid (GNA), S-isomer
  modified_base 8: mod_base = OTHER; note = 2'-O-methyladenosine-3'-phosphate
  modified_base 9: mod_base = OTHER; note = 2'-O-methylcytidine-3'-phosphate
  modified_base 10: mod_base = OTHER; note = 2'-O-methylcytidine-3'-phosphate
  modified_base 11: mod_base = OTHER; note = 2'-O-methyladenosine-3'-phosphate
  modified_base 12: mod_base = OTHER; note = 2'-O-methylcytidine-3'-phosphate
  modified_base 13: mod_base = OTHER; note = 2'-O-methyladenosine-3'-phosphate
  modified_base 14: mod_base = OTHER; note = 2'-deoxy-2'-fluoroadenosine-3'-phosphate
  modified_base 15: mod_base = OTHER; note = 2'-O-methylguanosine-3'-phosphate
  modified_base 16: mod_base = OTHER; note = 2'-deoxy-2'-fluorocytidine-3'-phosphate
  modified_base 17: mod_base = OTHER; note = 2'-O-methylcytidine-3'-phosphate
  modified_base 18: mod_base = OTHER; note = 2'-O-methyladenosine-3'-phosphate
  modified_base 19: mod_base = OTHER; note = 2'-O-methyladenosine-3'-phosphate
  modified_base 20: mod_base = OTHER; note = 2'-O-methyladenosine-3'-phosphate
  modified_base 21: mod_base = OTHER; note = 2'-O-methylcytidine-3'-phosphorothioate
  modified_base 22: mod_base = OTHER; note = 2'-O-methylguanosine-3'-phosphorothioate
  modified_base 23: mod_base = OTHER; note = 2'-O-methyladenosine
aaattacaccacaagccaaacga

SEQ ID NO: 965 - RNA, 23 nt, synthetic construct
  source 1..23: mol_type = other RNA
  modified_base 1: mod_base = OTHER; note = 2'-O-methyladenosine-3'-phosphorothioate
  modified_base 2: mod_base = OTHER; note = 2'-deoxy-2'-fluorocytidine-3'-phosphorothioate
  modified_base 3: mod_base = OTHER; note = 2'-O-methyladenosine-3'-phosphate
  modified_base 4: mod_base = OTHER; note = 2'-O-methyladenosine-3'-phosphate
  modified_base 5: mod_base = OTHER; note = 2'-O-methyluridine-3'-phosphate
  modified_base 6: mod_base = OTHER; note = 2'-O-methyluridine-3'-phosphate
  modified_base 7: mod_base = OTHER; note = Adenosine-glycol nucleic acid (GNA), S-isomer
  modified_base 8: mod_base = OTHER; note = 2'-O-methylcytidine-3'-phosphate
  modified_base 9: mod_base = OTHER; note = 2'-O-methyladenosine-3'-phosphate
  modified_base 10: mod_base = OTHER; note = 2'-O-methylcytidine-3'-phosphate
  modified_base 11: mod_base = OTHER; note = 2'-O-methylcytidine-3'-phosphate
  modified_base 12: mod_base = OTHER; note = 2'-O-methyladenosine-3'-phosphate
  modified_base 13: mod_base = OTHER; note = 2'-O-methylcytidine-3'-phosphate
  modified_base 14: mod_base = OTHER; note = 2'-deoxy-2'-fluoroadenosine-3'-phosphate
  modified_base 15: mod_base = OTHER; note = 2'-O-methyladenosine-3'-phosphate
  modified_base 16: mod_base = OTHER; note = 2'-deoxy-2'-fluoroguanosine-3'-phosphate
  modified_base 17: mod_base = OTHER; note = 2'-O-methylcytidine-3'-phosphate
  modified_base 18: mod_base = OTHER; note = 2'-O-methylcytidine-3'-phosphate
  modified_base 19: mod_base = OTHER; note = 2'-O-methyladenosine-3'-phosphate
  modified_base 20: mod_base = OTHER; note = 2'-O-methyladenosine-3'-phosphate
  modified_base 21: mod_base = OTHER; note = 2'-O-methyladenosine-3'-phosphorothioate
  modified_base 22: mod_base = OTHER; note = 2'-O-methylcytidine-3'-phosphorothioate
  modified_base 23: mod_base = OTHER; note = 2'-O-methylguanosine
acaattacaccacaagccaaacg

SEQ ID NO: 966 - RNA, 23 nt, synthetic construct
  source 1..23: mol_type = other RNA
  modified_base 1: mod_base = OTHER; note = 2'-O-methyladenosine-3'-phosphorothioate
  modified_base 2: mod_base = OTHER; note = 2'-deoxy-2'-fluorocytidine-3'-phosphorothioate
  modified_base 3: mod_base = OTHER; note = 2'-O-methylcytidine-3'-phosphate
  modified_base 4: mod_base = OTHER; note = 2'-O-methyladenosine-3'-phosphate
  modified_base 5: mod_base = OTHER; note = 2'-O-methyladenosine-3'-phosphate
  modified_base 6: mod_base = OTHER; note = 2'-O-methyluridine-3'-phosphate
  modified_base 7: mod_base = OTHER; note = Thymidine-glycol nucleic acid (GNA), S-Isomer
  modified_base 8: mod_base = OTHER; note = 2'-O-methyladenosine-3'-phosphate
  modified_base 9: mod_base = OTHER; note = 2'-O-methylcytidine-3'-phosphate
  modified_base 10: mod_base = OTHER; note = 2'-O-methyladenosine-3'-phosphate
  modified_base 11: mod_base = OTHER; note = 2'-O-methylcytidine-3'-phosphate
  modified_base 12: mod_base = OTHER; note = 2'-O-methylcytidine-3'-phosphate
  modified_base 13: mod_base = OTHER; note = 2'-O-methyladenosine-3'-phosphate
  modified_base 14: mod_base = OTHER; note = 2'-deoxy-2'-fluorocytidine-3'-phosphate
  modified_base 15: mod_base = OTHER; note = 2'-O-methyladenosine-3'-phosphate
  modified_base 16: mod_base = OTHER; note = 2'-deoxy-2'-fluoroadenosine-3'-phosphate
  modified_base 17: mod_base = OTHER; note = 2'-O-methylguanosine-3'-phosphate
  modified_base 18: mod_base = OTHER; note = 2'-O-methylcytidine-3'-phosphate
  modified_base 19: mod_base = OTHER; note = 2'-O-methylcytidine-3'-phosphate
  modified_base 20: mod_base = OTHER; note = 2'-O-methyladenosine-3'-phosphate
  modified_base 21: mod_base = OTHER; note = 2'-O-methyladenosine-3'-phosphorothioate
  modified_base 22: mod_base = OTHER; note = 2'-O-methyladenosine-3'-phosphorothioate
  modified_base 23: mod_base = OTHER; note = 2'-O-methylcytidine
accaattacaccacaagccaaac

SEQ ID NO: 967 - RNA, 23 nt, synthetic construct
  source 1..23: mol_type = other RNA
  modified_base 1: mod_base = OTHER; note = 2'-O-methyluridine-3'-phosphorothioate
  modified_base 2: mod_base = OTHER; note = 2'-deoxy-2'-fluorocytidine-3'-phosphorothioate
  modified_base 3: mod_base = OTHER; note = 2'-O-methylcytidine-3'-phosphate
  modified_base 4: mod_base = OTHER; note = 2'-O-methylcytidine-3'-phosphate
  modified_base 5: mod_base = OTHER; note = 2'-O-methyladenosine-3'-phosphate
  modified_base 6: mod_base = OTHER; note = 2'-O-methyladenosine-3'-phosphate
  modified_base 7: mod_base = OTHER; note = Thymidine-glycol nucleic acid (GNA), S-Isomer
  modified_base 8: mod_base = OTHER; note = 2'-O-methyluridine-3'-phosphate
  modified_base 9: mod_base = OTHER; note = 2'-O-methyladenosine-3'-phosphate
  modified_base 10: mod_base = OTHER; note = 2'-O-methylcytidine-3'-phosphate
  modified_base 11: mod_base = OTHER; note = 2'-O-methyladenosine-3'-phosphate
  modified_base 12: mod_base = OTHER; note = 2'-O-methylcytidine-3'-phosphate
  modified_base 13: mod_base = OTHER; note = 2'-O-methylcytidine-3'-phosphate
  modified_base 14: mod_base = OTHER; note = 2'-deoxy-2'-fluoroadenosine-3'-phosphate
  modified_base 15: mod_base = OTHER; note = 2'-O-methylcytidine-3'-phosphate
  modified_base 16: mod_base = OTHER; note = 2'-deoxy-2'-fluoroadenosine-3'-phosphate
  modified_base 17: mod_base = OTHER; note = 2'-O-methyladenosine-3'-phosphate
  modified_base 18: mod_base = OTHER; note = 2'-O-methylguanosine-3'-phosphate
  modified_base 19: mod_base = OTHER; note = 2'-O-methylcytidine-3'-phosphate
  modified_base 20: mod_base = OTHER; note = 2'-O-methylcytidine-3'-phosphate
  modified_base 21: mod_base = OTHER; note = 2'-O-methyladenosine-3'-phosphorothioate
  modified_base 22: mod_base = OTHER; note = 2'-O-methyladenosine-3'-phosphorothioate
  modified_base 23: mod_base = OTHER; note = 2'-O-methyladenosine
tcccaattacaccacaagccaaa

SEQ ID NO: 968 - RNA, 23 nt, synthetic construct
  source 1..23: mol_type = other RNA
  modified_base 1: mod_base = OTHER; note = 2'-O-methyladenosine-3'-phosphorothioate
  modified_base 2: mod_base = OTHER; note = 2'-deoxy-2'-fluorouridine-3'-phosphorothioate
  modified_base 3: mod_base = OTHER; note = 2'-O-methylcytidine-3'-phosphate
  modified_base 4: mod_base = OTHER; note = 2'-O-methylcytidine-3'-phosphate
  modified_base 5: mod_base = OTHER; note = 2'-O-methylcytidine-3'-phosphate
  modified_base 6: mod_base = OTHER; note = 2'-O-methyladenosine-3'-phosphate
  modified_base 7: mod_base = OTHER; note = Adenosine-glycol nucleic acid (GNA), S-isomer
  modified_base 8: mod_base = OTHER; note = 2'-O-methyluridine-3'-phosphate
  modified_base 9: mod_base = OTHER; note = 2'-O-methyluridine-3'-phosphate
  modified_base 10: mod_base = OTHER; note = 2'-O-methyladenosine-3'-phosphate
  modified_base 11: mod_base = OTHER; note = 2'-O-methylcytidine-3'-phosphate
  modified_base 12: mod_base = OTHER; note = 2'-O-methyladenosine-3'-phosphate
  modified_base 13: mod_base = OTHER; note = 2'-O-methylcytidine-3'-phosphate
  modified_base 14: mod_base = OTHER; note = 2'-deoxy-2'-fluorocytidine-3'-phosphate
  modified_base 15: mod_base = OTHER; note = 2'-O-methyladenosine-3'-phosphate
  modified_base 16: mod_base = OTHER; note = 2'-deoxy-2'-fluorocytidine-3'-phosphate
  modified_base 17: mod_base = OTHER; note = 2'-O-methyladenosine-3'-phosphate
  modified_base 18: mod_base = OTHER; note = 2'-O-methyladenosine-3'-phosphate
  modified_base 19: mod_base = OTHER; note = 2'-O-methylguanosine-3'-phosphate
  modified_base 20: mod_base = OTHER; note = 2'-O-methylcytidine-3'-phosphate
  modified_base 21: mod_base = OTHER; note = 2'-O-methylcytidine-3'-phosphorothioate
  modified_base 22: mod_base = OTHER; note = 2'-O-methyladenosine-3'-phosphorothioate
  modified_base 23: mod_base = OTHER; note = 2'-O-methyladenosine
atcccaattacaccacaagccaa

SEQ ID NO: 969 - RNA, 23 nt, synthetic construct
  source 1..23: mol_type = other RNA
  modified_base 1: mod_base = OTHER; note = 2'-O-methyladenosine-3'-phosphorothioate
  modified_base 2: mod_base = OTHER; note = 2'-deoxy-2'-fluoroadenosine-3'-phosphorothioate
  modified_base 3: mod_base = OTHER; note = 2'-O-methyluridine-3'-phosphate
  modified_base 4: mod_base = OTHER; note = 2'-O-methylcytidine-3'-phosphate
  modified_base 5: mod_base = OTHER; note = 2'-O-methylcytidine-3'-phosphate
  modified_base 6: mod_base = OTHER; note = 2'-O-methylcytidine-3'-phosphate
  modified_base 7: mod_base = OTHER; note = Adenosine-glycol nucleic acid (GNA), S-isomer
  modified_base 8: mod_base = OTHER; note = 2'-O-methyladenosine-3'-phosphate
  modified_base 9: mod_base = OTHER; note = 2'-O-methyluridine-3'-phosphate
  modified_base 10: mod_base = OTHER; note = 2'-O-methyluridine-3'-phosphate
  modified_base 11: mod_base = OTHER; note = 2'-O-methyladenosine-3'-phosphate
  modified_base 12: mod_base = OTHER; note = 2'-O-methylcytidine-3'-phosphate
  modified_base 13: mod_base = OTHER; note = 2'-O-methyladenosine-3'-phosphate
  modified_base 14: mod_base = OTHER; note = 2'-deoxy-2'-fluorocytidine-3'-phosphate
  modified_base 15: mod_base = OTHER; note = 2'-O-methylcytidine-3'-phosphate
  modified_base 16: mod_base = OTHER; note = 2'-deoxy-2'-fluoroadenosine-3'-phosphate
  modified_base 17: mod_base = OTHER; note = 2'-O-methylcytidine-3'-phosphate
  modified_base 18: mod_base = OTHER; note = 2'-O-methyladenosine-3'-phosphate
  modified_base 19: mod_base = OTHER; note = 2'-O-methyladenosine-3'-phosphate
  modified_base 20: mod_base = OTHER; note = 2'-O-methylguanosine-3'-phosphate
  modified_base 21: mod_base = OTHER; note = 2'-O-methylcytidine-3'-phosphorothioate
  modified_base 22: mod_base = OTHER; note = 2'-O-methylcytidine-3'-phosphorothioate
  modified_base 23: mod_base = OTHER; note = 2'-O-methyladenosine
aatcccaattacaccacaagcca

SEQ ID NO: 970 - RNA, 23 nt, synthetic construct
  source 1..23: mol_type = other RNA
  modified_base 1: mod_base = OTHER; note = 2'-O-methyladenosine-3'-phosphorothioate
  modified_base 2: mod_base = OTHER; note = 2'-deoxy-2'-fluoroguanosine-3'-phosphorothioate
  modified_base 3: mod_base = OTHER; note = 2'-O-methyladenosine-3'-phosphate
  modified_base 4: mod_base = OTHER; note = 2'-O-methyluridine-3'-phosphate
  modified_base 5: mod_base = OTHER; note = 2'-O-methylcytidine-3'-phosphate
  modified_base 6: mod_base = OTHER; note = 2'-O-methylcytidine-3'-phosphate
  modified_base 7: mod_base = OTHER; note = Cytidine-glycol nucleic acid (GNA), S-isomer
  modified_base 8: mod_base = OTHER; note = 2'-O-methyladenosine-3'-phosphate
  modified_base 9: mod_base = OTHER; note = 2'-O-methyladenosine-3'-phosphate
  modified_base 10: mod_base = OTHER; note = 2'-O-methyluridine-3'-phosphate
  modified_base 11: mod_base = OTHER; note = 2'-O-methyluridine-3'-phosphate
  modified_base 12: mod_base = OTHER; note = 2'-O-methyladenosine-3'-phosphate
  modified_base 13: mod_base = OTHER; note = 2'-O-methylcytidine-3'-phosphate
  modified_base 14: mod_base = OTHER; note = 2'-deoxy-2'-fluoroadenosine-3'-phosphate
  modified_base 15: mod_base = OTHER; note = 2'-O-methylcytidine-3'-phosphate
  modified_base 16: mod_base = OTHER; note = 2'-deoxy-2'-fluorocytidine-3'-phosphate
  modified_base 17: mod_base = OTHER; note = 2'-O-methyladenosine-3'-phosphate
  modified_base 18: mod_base = OTHER; note = 2'-O-methylcytidine-3'-phosphate
  modified_base 19: mod_base = OTHER; note = 2'-O-methyladenosine-3'-phosphate
  modified_base 20: mod_base = OTHER; note = 2'-O-methyladenosine-3'-phosphate
  modified_base 21: mod_base = OTHER; note = 2'-O-methylguanosine-3'-phosphorothioate
  modified_base 22: mod_base = OTHER; note = 2'-O-methylcytidine-3'-phosphorothioate
  modified_base 23: mod_base = OTHER; note = 2'-O-methylcytidine
agatcccaattacaccacaagcc

SEQ ID NO: 971 - RNA, 23 nt, synthetic construct
  source 1..23: mol_type = other RNA
  modified_base 1: mod_base = OTHER; note = 2'-O-methyladenosine-3'-phosphorothioate
  modified_base 2: mod_base = OTHER; note = 2'-deoxy-2'-fluorocytidine-3'-phosphorothioate
  modified_base 3: mod_base = OTHER; note = 2'-O-methylguanosine-3'-phosphate
  modified_base 4: mod_base = OTHER; note = 2'-O-methyladenosine-3'-phosphate
  modified_base 5: mod_base = OTHER; note = 2'-O-methyluridine-3'-phosphate
  modified_base 6: mod_base = OTHER; note = 2'-O-methylcytidine-3'-phosphate
  modified_base 7: mod_base = OTHER; note = Cytidine-glycol nucleic acid (GNA), S-isomer
  modified_base 8: mod_base = OTHER; note = 2'-O-methylcytidine-3'-phosphate
  modified_base 9: mod_base = OTHER; note = 2'-O-methyladenosine-3'-phosphate
  modified_base 10: mod_base = OTHER; note = 2'-O-methyladenosine-3'-phosphate
  modified_base 11: mod_base = OTHER; note = 2'-O-methyluridine-3'-phosphate
  modified_base 12: mod_base = OTHER; note = 2'-O-methyluridine-3'-phosphate
  modified_base 13: mod_base = OTHER; note = 2'-O-methyladenosine-3'-phosphate
  modified_base 14: mod_base = OTHER; note = 2'-deoxy-2'-fluorocytidine-3'-phosphate
  modified_base 15: mod_base = OTHER; note = 2'-O-methyladenosine-3'-phosphate
  modified_base 16: mod_base = OTHER; note = 2'-deoxy-2'-fluorocytidine-3'-phosphate
  modified_base 17: mod_base = OTHER; note = 2'-O-methylcytidine-3'-phosphate
  modified_base 18: mod_base = OTHER; note = 2'-O-methyladenosine-3'-phosphate
  modified_base 19: mod_base = OTHER; note = 2'-O-methylcytidine-3'-phosphate
  modified_base 20: mod_base = OTHER; note = 2'-O-methyladenosine-3'-phosphate
  modified_base 21: mod_base = OTHER; note = 2'-O-methyladenosine-3'-phosphorothioate
  modified_base 22: mod_base = OTHER; note = 2'-O-methylguanosine-3'-phosphorothioate
  modified_base 23: mod_base = OTHER; note = 2'-O-methylcytidine
acgatcccaattacaccacaagc

SEQ ID NO: 972 - RNA, 23 nt, synthetic construct
  source 1..23: mol_type = other RNA
  modified_base 1: mod_base = OTHER; note = 2'-O-methyladenosine-3'-phosphorothioate
  modified_base 2: mod_base = OTHER; note = 2'-deoxy-2'-fluoroguanosine-3'-phosphorothioate
  modified_base 3: mod_base = OTHER; note = 2'-O-methylcytidine-3'-phosphate
  modified_base 4: mod_base = OTHER; note = 2'-O-methylguanosine-3'-phosphate
  modified_base 5: mod_base = OTHER; note = 2'-O-methyladenosine-3'-phosphate
  modified_base 6: mod_base = OTHER; note = 2'-O-methyluridine-3'-phosphate
  modified_base 7: mod_base = OTHER; note = Cytidine-glycol nucleic acid (GNA), S-isomer
  modified_base 8: mod_base = OTHER; note = 2'-O-methylcytidine-3'-phosphate
  modified_base 9: mod_base = OTHER; note = 2'-O-methylcytidine-3'-phosphate
  modified_base 10: mod_base = OTHER; note = 2'-O-methyladenosine-3'-phosphate
  modified_base 11: mod_base = OTHER; note = 2'-O-methyladenosine-3'-phosphate
  modified_base 12: mod_base = OTHER; note = 2'-O-methyluridine-3'-phosphate
  modified_base 13: mod_base = OTHER; note = 2'-O-methyluridine-3'-phosphate
  modified_base 14: mod_base = OTHER; note = 2'-deoxy-2'-fluoroadenosine-3'-phosphate
  modified_base 15: mod_base = OTHER; note = 2'-O-methylcytidine-3'-phosphate
  modified_base 16: mod_base = OTHER; note = 2'-deoxy-2'-fluoroadenosine-3'-phosphate
  modified_base 17: mod_base = OTHER; note = 2'-O-methylcytidine-3'-phosphate
  modified_base 18: mod_base = OTHER; note = 2'-O-methylcytidine-3'-phosphate
  modified_base 19: mod_base = OTHER; note = 2'-O-methyladenosine-3'-phosphate
  modified_base 20: mod_base = OTHER; note = 2'-O-methylcytidine-3'-phosphate
  modified_base 21: mod_base = OTHER; note = 2'-O-methyladenosine-3'-phosphorothioate
  modified_base 22: mod_base = OTHER; note = 2'-O-methyladenosine-3'-phosphorothioate
  modified_base 23: mod_base = OTHER; note = 2'-O-methylguanosine
agcgatcccaattacaccacaag

SEQ ID NO: 973 - RNA, 23 nt, synthetic construct
  source 1..23: mol_type = other RNA
  modified_base 1: mod_base = OTHER; note = 2'-O-methyluridine-3'-phosphorothioate
  modified_base 2: mod_base = OTHER; note = 2'-deoxy-2'-fluorouridine-3'-phosphorothioate
  modified_base 3: mod_base = OTHER; note = 2'-O-methyladenosine-3'-phosphate
  modified_base 4: mod_base = OTHER; note = 2'-O-methyluridine-3'-phosphate
  modified_base 5: mod_base = OTHER; note = 2'-O-methyluridine-3'-phosphate
  modified_base 6: mod_base = OTHER; note = 2'-O-methylguanosine-3'-phosphate
  modified_base 7: mod_base = OTHER; note = Guanosine-glycol nucleic acid (GNA), S-isomer
  modified_base 8: mod_base = OTHER; note = 2'-O-methylguanosine-3'-phosphate
  modified_base 9: mod_base = OTHER; note = 2'-O-methylcytidine-3'-phosphate
  modified_base 10: mod_base = OTHER; note = 2'-O-methylguanosine-3'-phosphate
  modified_base 11: mod_base = OTHER; note = 2'-O-methyladenosine-3'-phosphate
  modified_base 12: mod_base = OTHER; note = 2'-O-methyluridine-3'-phosphate
  modified_base 13: mod_base = OTHER; note = 2'-O-methylcytidine-3'-phosphate
  modified_base 14: mod_base = OTHER; note = 2'-deoxy-2'-fluorocytidine-3'-phosphate
  modified_base 15: mod_base = OTHER; note = 2'-O-methylcytidine-3'-phosphate
  modified_base 16: mod_base = OTHER; note = 2'-deoxy-2'-fluoroadenosine-3'-phosphate
  modified_base 17: mod_base = OTHER; note = 2'-O-methyladenosine-3'-phosphate
  modified_base 18: mod_base = OTHER; note = 2'-O-methyluridine-3'-phosphate
  modified_base 19: mod_base = OTHER; note = 2'-O-methyluridine-3'-phosphate
  modified_base 20: mod_base = OTHER; note = 2'-O-methyladenosine-3'-phosphate
  modified_base 21: mod_base = OTHER; note = 2'-O-methylcytidine-3'-phosphorothioate
  modified_base 22: mod_base = OTHER; note = 2'-O-methyladenosine-3'-phosphorothioate
  modified_base 23: mod_base = OTHER; note = 2'-O-methylcytidine
ttattgggcgatcccaattacac

SEQ ID NO: 974 - RNA, 23 nt, synthetic construct
  source 1..23: mol_type = other RNA
acacggtgggccaaaggatgaag

SEQ ID NO: 975 - RNA, 21 nt, synthetic construct
  source 1..21: mol_type = other RNA
catcaatttcgagcagaagga

SEQ ID NO: 976 - RNA, 21 nt, synthetic construct
  source 1..21: mol_type = other RNA
agcagaaggaaagtaatggat

SEQ ID NO: 977 - RNA, 21 nt, synthetic construct
  source 1..21: mol_type = other RNA
gcagaaggaaagtaatggact

SEQ ID NO: 978 - RNA, 21 nt, synthetic construct
  source 1..21: mol_type = other RNA
gtaatggaccagtgaaggtgt

SEQ ID NO: 979 - RNA, 21 nt, synthetic construct
  source 1..21: mol_type = other RNA
aatggaccagtgaaggtgtgt

SEQ ID NO: 980 - RNA, 21 nt, synthetic construct
  source 1..21: mol_type = other RNA
gtaccagtgcaggtcctcact

SEQ ID NO: 981 - RNA, 21 nt, synthetic construct
  source 1..21: mol_type = other RNA
taccagtgcaggtcctcactt

SEQ ID NO: 982 - RNA, 21 nt, synthetic construct
  source 1..21: mol_type = other RNA
actttaatcctctatccagaa

SEQ ID NO: 983 - RNA, 21 nt, synthetic construct
  source 1..21: mol_type = other RNA
gtgggccaaaggatgaagaga

SEQ ID NO: 984 - RNA, 21 nt, synthetic construct
  source 1..21: mol_type = other RNA
tgggccaaaggatgaagagat

SEQ ID NO: 985 - RNA, 21 nt, synthetic construct
  source 1..21: mol_type = other RNA
gggccaaaggatgaagagagt

SEQ ID NO: 986 - RNA, 21 nt, synthetic construct
  source 1..21: mol_type = other RNA
ggccaaaggatgaagagaggt

SEQ ID NO: 987 - RNA, 21 nt, synthetic construct
  source 1..21: mol_type = other RNA
gccaaaggatgaagagaggca

SEQ ID NO: 988 - RNA, 21 nt, synthetic construct
  source 1..21: mol_type = other RNA
ccaaaggatgaagagaggcat

SEQ ID NO: 989 - RNA, 21 nt, synthetic construct
  source 1..21: mol_type = other RNA
aaaggatgaagagaggcatgt

SEQ ID NO: 990 - RNA, 21 nt, synthetic construct
  source 1..21: mol_type = other RNA
tgaagagaggcatgttggaga

SEQ ID NO: 991 - RNA, 21 nt, synthetic construct
  source 1..21: mol_type = other RNA
agagaggcatgttggagactt

SEQ ID NO: 992 - RNA, 21 nt, synthetic construct
  source 1..21: mol_type = other RNA
gagaggcatgttggagacttt

SEQ ID NO: 993 - RNA, 21 nt, synthetic construct
  source 1..21: mol_type = other RNA
agaggcatgttggagacttgt

SEQ ID NO: 994 - RNA, 21 nt, synthetic construct
  source 1..21: mol_type = other RNA
cagatgacttgggcaaaggtt

SEQ ID NO: 995 - RNA, 21 nt, synthetic construct
  source 1..21: mol_type = other RNA
cttgggcaaaggtggaaatga

SEQ ID NO: 996 - RNA, 21 nt, synthetic construct
  source 1..21: mol_type = other RNA
tgggcaaaggtggaaatgaat

SEQ ID NO: 997 - RNA, 21 nt, synthetic construct
  source 1..21: mol_type = other RNA
gggcaaaggtggaaatgaaga

SEQ ID NO: 998 - RNA, 21 nt, synthetic construct
  source 1..21: mol_type = other RNA
ggcaaaggtggaaatgaagaa

SEQ ID NO: 999 - RNA, 21 nt, synthetic construct
  source 1..21: mol_type = other RNA
gcaaaggtggaaatgaagaaa

SEQ ID NO: 1000 - RNA, 21 nt, synthetic construct
  source 1..21: mol_type = other RNA
caaaggtggaaatgaagaaat

SEQ ID NO: 1001 - RNA, 21 nt, synthetic construct
  source 1..21: mol_type = other RNA
aaaggtggaaatgaagaaagt

SEQ ID NO: 1002 - RNA, 21 nt, synthetic construct
  source 1..21: mol_type = other RNA
ggtggaaatgaagaaagtaca

SEQ ID NO: 1003 - RNA, 21 nt, synthetic construct
  source 1..21: mol_type = other RNA
gtggaaatgaagaaagtacaa

SEQ ID NO: 1004 - RNA, 21 nt, synthetic construct
  source 1..21: mol_type = other RNA
tggaaatgaagaaagtacaaa

SEQ ID NO: 1005 - RNA, 21 nt, synthetic construct
  source 1..21: mol_type = other RNA
ggaaatgaagaaagtacaaat

SEQ ID NO: 1006 - RNA, 21 nt, synthetic construct
  source 1..21: mol_type = other RNA
gaaatgaagaaagtacaaaga

SEQ ID NO: 1007 - RNA, 21 nt, synthetic construct
  source 1..21: mol_type = other RNA
aaatgaagaaagtacaaagat

SEQ ID NO: 1008 - RNA, 21 nt, synthetic construct
  source 1..21: mol_type = other RNA
aatgaagaaagtacaaagaca

SEQ ID NO: 1009 - RNA, 23 nt, synthetic construct
  source 1..23: mol_type = other RNA
accttctgctcgaaattgatgat

SEQ ID NO: 1010 - RNA, 23 nt, synthetic construct
  source 1..23: mol_type = other RNA
  modified_base 5: mod_base = OTHER; note = 5'-methyluridine-3'-phosphate
ttccttctgctcgaaattgatga

SEQ ID NO: 1011 - RNA, 23 nt, synthetic construct
  source 1..23: mol_type = other RNA
  modified_base 7: mod_base = OTHER; note = 5'-methyluridine-3'-phosphate
tttccttctgctcgaaattgatg

SEQ ID NO: 1012 - RNA, 23 nt, synthetic construct
  source 1..23: mol_type = other RNA
  modified_base 7: mod_base = OTHER; note = 5'-methyluridine-3'-phosphate
atttccttctgctcgaaattgat

SEQ ID NO: 1013 - RNA, 23 nt, synthetic construct
  source 1..23: mol_type = other RNA
  modified_base 5: mod_base = OTHER; note = 5'-methyluridine-3'-phosphate
actttccttctgctcgaaattga

SEQ ID NO: 1014 - RNA, 23 nt, synthetic construct
  source 1..23: mol_type = other RNA
  modified_base 5: mod_base = OTHER; note = 5'-methyluridine-3'-phosphate
tactttccttctgctcgaaattg

SEQ ID NO: 1015 - RNA, 23 nt, synthetic construct
  source 1..23: mol_type = other RNA
  modified_base 5: mod_base = OTHER; note = 5'-methyluridine-3'-phosphate
  modified_base 7: mod_base = OTHER; note = 5'-methyluridine-3'-phosphate
ttactttccttctgctcgaaatt

SEQ ID NO: 1016 - RNA, 23 nt, synthetic construct
  source 1..23: mol_type = other RNA
  modified_base 7: mod_base = OTHER; note = 5'-methyluridine-3'-phosphate
aattactttccttctgctcgaaa

SEQ ID NO: 1017 - RNA, 23 nt, synthetic construct
  source 1..23: mol_type = other RNA
accattactttccttctgctcga

SEQ ID NO: 1018 - RNA, 23 nt, synthetic construct
  source 1..23: mol_type = other RNA
atccattactttccttctgctcg

SEQ ID NO: 1019 - RNA, 23 nt, synthetic construct
  source 1..23: mol_type = other RNA
  modified_base 7: mod_base = OTHER; note = 5'-methyluridine-3'-phosphate
agtccattactttccttctgctc

SEQ ID NO: 1020 - RNA, 23 nt, synthetic construct
  source 1..23: mol_type = other RNA
  modified_base 5: mod_base = OTHER; note = 5'-methyluridine-3'-phosphate
atggtccattactttccttctgc

SEQ ID NO: 1021 - RNA, 23 nt, synthetic construct
  source 1..23: mol_type = other RNA
  modified_base 7: mod_base = OTHER; note = 5'-methyluridine-3'-phosphate
aactggtccattactttccttct

SEQ ID NO: 1022 - RNA, 23 nt, synthetic construct
  source 1..23: mol_type = other RNA
  modified_base 5: mod_base = OTHER; note = 5'-methyluridine-3'-phosphate
tcactggtccattactttccttc

SEQ ID NO: 1023 - RNA, 23 nt, synthetic construct
  source 1..23: mol_type = other RNA
  modified_base 5: mod_base = OTHER; note = 5'-methyluridine-3'-phosphate
aaccttcactggtccattacttt

SEQ ID NO: 1024 - RNA, 23 nt, synthetic construct
  source 1..23: mol_type = other RNA
acaccttcactggtccattactt

SEQ ID NO: 1025 - RNA, 23 nt, synthetic construct
  source 1..23: mol_type = other RNA
acacaccttcactggtccattac

SEQ ID NO: 1026 - RNA, 23 nt, synthetic construct
  source 1..23: mol_type = other RNA
agtgaggacctgcactggtacag

SEQ ID NO: 1027 - RNA, 23 nt, synthetic construct
  source 1..23: mol_type = other RNA
aagtgaggacctgcactggtaca

SEQ ID NO: 1028 - RNA, 23 nt, synthetic construct
  source 1..23: mol_type = other RNA
  modified_base 5: mod_base = OTHER; note = 5'-methyluridine-3'-phosphate
aaagtgaggacctgcactggtac

SEQ ID NO: 1029 - RNA, 23 nt, synthetic construct
  source 1..23: mol_type = other RNA
aggatagaggattaaagtgagga

SEQ ID NO: 1030 - RNA, 23 nt, synthetic construct
  source 1..23: mol_type = other RNA
actggatagaggattaaagtgag

SEQ ID NO: 1031 - RNA, 23 nt, synthetic construct
  source 1..23: mol_type = other RNA
ttctggatagaggattaaagtga

SEQ ID NO: 1032 - RNA, 23 nt, synthetic construct
  source 1..23: mol_type = other RNA
  modified_base 5: mod_base = OTHER; note = 5'-methyluridine-3'-phosphate
tctcttcatcctttggcccaccg

SEQ ID NO: 1033 - RNA, 23 nt, synthetic construct
  source 1..23: mol_type = other RNA
  modified_base 7: mod_base = OTHER; note = 5'-methyluridine-3'-phosphate
atctcttcatcctttggcccacc

SEQ ID NO: 1034 - RNA, 23 nt, synthetic construct
  source 1..23: mol_type = other RNA
  modified_base 5: mod_base = OTHER; note = 5'-methyluridine-3'-phosphate
  modified_base 7: mod_base = OTHER; note = 5'-methyluridine-3'-phosphate
actctcttcatcctttggcccac

SEQ ID NO: 1035 - RNA, 23 nt, synthetic construct
  source 1..23: mol_type = other RNA
acctctcttcatcctttggccca

SEQ ID NO: 1036 - RNA, 23 nt, synthetic construct
  source 1..23: mol_type = other RNA
  modified_base 5: mod_base = OTHER; note = 5'-methyluridine-3'-phosphate
  modified_base 7: mod_base = OTHER; note = 5'-methyluridine-3'-phosphate
tgcctctcttcatcctttggccc

SEQ ID NO: 1037 - RNA, 23 nt, synthetic construct
  source 1..23: mol_type = other RNA
atgcctctcttcatcctttggcc

SEQ ID NO: 1038 - RNA, 23 nt, synthetic construct
  source 1..23: mol_type = other RNA
acatgcctctcttcatcctttgg

SEQ ID NO: 1039 - RNA, 23 nt, synthetic construct
  source 1..23: mol_type = other RNA
  modified_base 5: mod_base = OTHER; note = 5'-methyluridine-3'-phosphate
aacatgcctctcttcatcctttg

SEQ ID NO: 1040 - RNA, 23 nt, synthetic construct
  source 1..23: mol_type = other RNA
accaacatgcctctcttcatcct

SEQ ID NO: 1041 - RNA, 23 nt, synthetic construct
  source 1..23: mol_type = other RNA
actccaacatgcctctcttcatc

SEQ ID NO: 1042 - RNA, 23 nt, synthetic construct
  source 1..23: mol_type = other RNA
  modified_base 5: mod_base = OTHER; note = 5'-methyluridine-3'-phosphate
agtctccaacatgcctctcttca

SEQ ID NO: 1043 - RNA, 23 nt, synthetic construct
  source 1..23: mol_type = other RNA
aagtctccaacatgcctctcttc

SEQ ID NO: 1044 - RNA, 23 nt, synthetic construct
  source 1..23: mol_type = other RNA
  modified_base 5: mod_base = OTHER; note = 5'-methyluridine-3'-phosphate
  modified_base 7: mod_base = OTHER; note = 5'-methyluridine-3'-phosphate
aaagtctccaacatgcctctctt

SEQ ID NO: 1045 - RNA, 23 nt, synthetic construct
  source 1..23: mol_type = other RNA
acaagtctccaacatgcctctct

SEQ ID NO: 1046 - RNA, 23 nt, synthetic construct
  source 1..23: mol_type = other RNA
  modified_base 5: mod_base = OTHER; note = 5'-methyluridine-3'-phosphate
acctttgcccaagtcatctgctt

SEQ ID NO: 1047 - RNA, 23 nt, synthetic construct
  source 1..23: mol_type = other RNA
aacctttgcccaagtcatctgct

SEQ ID NO: 1048 - RNA, 23 nt, synthetic construct
  source 1..23: mol_type = other RNA
accacctttgcccaagtcatctg

SEQ ID NO: 1049 - RNA, 23 nt, synthetic construct
  source 1..23: mol_type = other RNA
  modified_base 5: mod_base = OTHER; note = 5'-methyluridine-3'-phosphate
aatttccacctttgcccaagtca

SEQ ID NO: 1050 - RNA, 23 nt, synthetic construct
  source 1..23: mol_type = other RNA
acatttccacctttgcccaagtc

SEQ ID NO: 1051 - RNA, 23 nt, synthetic construct
  source 1..23: mol_type = other RNA
  modified_base 5: mod_base = OTHER; note = 5'-methyluridine-3'-phosphate
  modified_base 7: mod_base = OTHER; note = 5'-methyluridine-3'-phosphate
ttcatttccacctttgcccaagt

SEQ ID NO: 1052 - RNA, 23 nt, synthetic construct
  source 1..23: mol_type = other RNA
  modified_base 7: mod_base = OTHER; note = 5'-methyluridine-3'-phosphate
attcatttccacctttgcccaag

SEQ ID NO: 1053 - RNA, 23 nt, synthetic construct
  source 1..23: mol_type = other RNA
acttcatttccacctttgcccaa

SEQ ID NO: 1054 - RNA, 23 nt, synthetic construct
  source 1..23: mol_type = other RNA
  modified_base 5: mod_base = OTHER; note = 5'-methyluridine-3'-phosphate
ttcttcatttccacctttgccca

SEQ ID NO: 1055 - RNA, 23 nt, synthetic construct
  source 1..23: mol_type = other RNA
  modified_base 5: mod_base = OTHER; note = 5'-methyluridine-3'-phosphate
tttcttcatttccacctttgccc

SEQ ID NO: 1056 - RNA, 23 nt, synthetic construct
  source 1..23: mol_type = other RNA
  modified_base 7: mod_base = OTHER; note = 5'-methyluridine-3'-phosphate
atttcttcatttccacctttgcc

SEQ ID NO: 1057 - RNA, 23 nt, synthetic construct
  source 1..23: mol_type = other RNA
  modified_base 5: mod_base = OTHER; note = 5'-methyluridine-3'-phosphate
  modified_base 7: mod_base = OTHER; note = 5'-methyluridine-3'-phosphate
actttcttcatttccacctttgc

SEQ ID NO: 1058 - RNA, 23 nt, synthetic construct
  source 1..23: mol_type = other RNA
  modified_base 5: mod_base = OTHER; note = 5'-methyluridine-3'-phosphate
tactttcttcatttccacctttg

SEQ ID NO: 1059 - RNA, 23 nt, synthetic construct
  source 1..23: mol_type = other RNA
  modified_base 5: mod_base = OTHER; note = 5'-methyluridine-3'-phosphate
  modified_base 7: mod_base = OTHER; note = 5'-methyluridine-3'-phosphate
atactttcttcatttccaccttt

SEQ ID NO: 1060 - RNA, 23 nt, synthetic construct
  source 1..23: mol_type = other RNA
agtactttcttcatttccacctt

SEQ ID NO: 1061 - RNA, 23 nt, synthetic construct
  source 1..23: mol_type = other RNA
  modified_base 7: mod_base = OTHER; note = 5'-methyluridine-3'-phosphate
ttgtactttcttcatttccacct

SEQ ID NO: 1062 - RNA, 23 nt, synthetic construct
  source 1..23: mol_type = other RNA
  modified_base 5: mod_base = OTHER; note = 5'-methyluridine-3'-phosphate
tttgtactttcttcatttccacc

SEQ ID NO: 1063 - RNA, 23 nt, synthetic construct
  source 1..23: mol_type = other RNA
atttgtactttcttcatttccac

SEQ ID NO: 1064 - RNA, 23 nt, synthetic construct
  source 1..23: mol_type = other RNA
  modified_base 5: mod_base = OTHER; note = 5'-methyluridine-3'-phosphate
  modified_base 7: mod_base = OTHER; note = 5'-methyluridine-3'-phosphate
tctttgtactttcttcatttcca

SEQ ID NO: 1065 - RNA, 23 nt, synthetic construct
  source 1..23: mol_type = other RNA
  modified_base 5: mod_base = OTHER; note = 5'-methyluridine-3'-phosphate
atctttgtactttcttcatttcc

SEQ ID NO: 1066 - RNA, 23 nt, synthetic construct
  source 1..23: mol_type = other RNA
  modified_base 5: mod_base = OTHER; note = 5'-methyluridine-3'-phosphate
  modified_base 7: mod_base = OTHER; note = 5'-methyluridine-3'-phosphate
tgtctttgtactttcttcatttc

SEQ ID NO: 1067 - RNA, 21 nt, synthetic construct
  source 1..21: mol_type = other RNA
  modified_base 1: mod_base = OTHER; note = 2'-O-methyluridine-3'-phosphorothioate
  modified_base 2: mod_base = OTHER; note = 2'-O-methylcytidine-3'-phosphorothioate
  modified_base 3: mod_base = OTHER; note = 2'-O-methyladenosine-3'-phosphate
  modified_base 4: mod_base = OTHER; note = 2'-O-methyluridine-3'-phosphate
  modified_base 5: mod_base = OTHER; note = 2'-O-methylcytidine-3'-phosphate
  modified_base 6: mod_base = OTHER; note = 2'-O-hexadecyl-adenosine-3'-phosphate
  modified_base 7: mod_base = OTHER; note = 2'-deoxy-2'-fluoroadenosine-3'-phosphate
  modified_base 8: mod_base = OTHER; note = 2'-O-methyluridine-3'-phosphate
  modified_base 9: mod_base = OTHER; note = 2'-deoxy-2'-fluorouridine-3'-phosphate
  modified_base 10: mod_base = OTHER; note = 2'-deoxy-2'-fluorouridine-3'-phosphate
  modified_base 11: mod_base = OTHER; note = 2'-deoxy-2'-fluorocytidine-3'-phosphate
  modified_base 12: mod_base = OTHER; note = 2'-O-methylguanosine-3'-phosphate
  modified_base 13: mod_base = OTHER; note = 2'-O-methyladenosine-3'-phosphate
  modified_base 14: mod_base = OTHER; note = 2'-O-methylguanosine-3'-phosphate
  modified_base 15: mod_base = OTHER; note = 2'-O-methylcytidine-3'-phosphate
  modified_base 16: mod_base = OTHER; note = 2'-O-methyladenosine-3'-phosphate
  modified_base 17: mod_base = OTHER; note = 2'-O-methylguanosine-3'-phosphate
  modified_base 18: mod_base = OTHER; note = 2'-O-methyladenosine-3'-phosphate
  modified_base 19: mod_base = OTHER; note = 2'-O-methyladenosine-3'-phosphate
  modified_base 20: mod_base = OTHER; note = 2'-O-methylguanosine-3'-phosphate
  modified_base 21: mod_base = OTHER; note = 2'-O-methyluridine-3'-phosphate ((2S,4R)-1-[29-[[2-(acetylamino)-2-deoxy-beta-D-galactopyra nosyl]oxy]-14,14-bis[[3-[[3-[[5-[[2-(acetylamino)-2-deoxy-b eta-D-galactopyranosyl]oxy]-1-oxopentyl]amino]propyl]amino] -3-oxopropoxy]methyl]-1,12,19,25-tetraoxo-16-oxa-13,20,24-t riazanonacos-1-yl]-4-hydroxy-2-pyrrolidinyl)methyl ester
tcatcaatttcgagcagaagt

SEQ ID NO: 1068 - RNA, 21 nt, synthetic construct
  source 1..21: mol_type = other RNA
  modified_base 1: mod_base = OTHER; note = 2'-O-methylcytidine-3'-phosphorothioate
  modified_base 2: mod_base = OTHER; note = 2'-O-methyladenosine-3'-phosphorothioate
  modified_base 3: mod_base = OTHER; note = 2'-O-methyluridine-3'-phosphate
  modified_base 4: mod_base = OTHER; note = 2'-O-methylcytidine-3'-phosphate
  modified_base 5: mod_base = OTHER; note = 2'-O-methyladenosine-3'-phosphate
  modified_base 6: mod_base = OTHER; note = 2'-O-hexadecyl-adenosine-3'-phosphate
  modified_base 7: mod_base = OTHER; note = 2'-deoxy-2'-fluorouridine-3'-phosphate
  modified_base 8: mod_base = OTHER; note = 2'-O-methyluridine-3'-phosphate
  modified_base 9: mod_base = OTHER; note = 2'-deoxy-2'-fluorouridine-3'-phosphate
  modified_base 10: mod_base = OTHER; note = 2'-deoxy-2'-fluorocytidine-3'-phosphate
  modified_base 11: mod_base = OTHER; note = 2'-deoxy-2'-fluoroguanosine-3'-phosphate
  modified_base 12: mod_base = OTHER; note = 2'-O-methyladenosine-3'-phosphate
  modified_base 13: mod_base = OTHER; note = 2'-O-methylguanosine-3'-phosphate
  modified_base 14: mod_base = OTHER; note = 2'-O-methylcytidine-3'-phosphate
  modified_base 15: mod_base = OTHER; note = 2'-O-methyladenosine-3'-phosphate
  modified_base 16: mod_base = OTHER; note = 2'-O-methylguanosine-3'-phosphate
  modified_base 17: mod_base = OTHER; note = 2'-O-methyladenosine-3'-phosphate
  modified_base 18: mod_base = OTHER; note = 2'-O-methyladenosine-3'-phosphate
  modified_base 19: mod_base = OTHER; note = 2'-O-methylguanosine-3'-phosphate
  modified_base 20: mod_base = OTHER; note = 2'-O-methylguanosine-3'-phosphate
  modified_base 21: mod_base = OTHER; note = 2'-O-methyladenosine-3'-phosphate ((2S,4R)-1-[29-[[2-(acetylamino)-2-deoxy-beta-D-galactopyra nosyl]oxy]-14,14-bis[[3-[[3-[[5-[[2-(acetylamino)-2-deoxy-b eta-D-galactopyranosyl]oxy]-1-oxopentyl]amino]propyl]amino] -3-oxopropoxy]methyl]-1,12,19,25-tetraoxo-16-oxa-13,20,24-t riazanonacos-1-yl]-4-hydroxy-2-pyrrolidinyl)methyl ester
catcaatttcgagcagaagga

SEQ ID NO: 1069 - RNA, 21 nt, synthetic construct
  source 1..21: mol_type = other RNA
  modified_base 1: mod_base = OTHER; note = 2'-O-methyladenosine-3'-phosphorothioate
  modified_base 2: mod_base = OTHER; note = 2'-O-methyluridine-3'-phosphorothioate
  modified_base 3: mod_base = OTHER; note = 2'-O-methylcytidine-3'-phosphate
  modified_base 4: mod_base = OTHER; note = 2'-O-methyladenosine-3'-phosphate
  modified_base 5: mod_base = OTHER; note = 2'-O-methyladenosine-3'-phosphate
  modified_base 6: mod_base = OTHER; note = 2'-O-hexadecyl-uridine-3'-phosphate
  modified_base 7: mod_base = OTHER; note = 2'-deoxy-2'-fluorouridine-3'-phosphate
  modified_base 8: mod_base = OTHER; note = 2'-O-methyluridine-3'-phosphate
  modified_base 9: mod_base = OTHER; note = 2'-deoxy-2'-fluorocytidine-3'-phosphate
  modified_base 10: mod_base = OTHER; note = 2'-deoxy-2'-fluoroguanosine-3'-phosphate
  modified_base 11: mod_base = OTHER; note = 2'-deoxy-2'-fluoroadenosine-3'-phosphate
  modified_base 12: mod_base = OTHER; note = 2'-O-methylguanosine-3'-phosphate
  modified_base 13: mod_base = OTHER; note = 2'-O-methylcytidine-3'-phosphate
  modified_base 14: mod_base = OTHER; note = 2'-O-methyladenosine-3'-phosphate
  modified_base 15: mod_base = OTHER; note = 2'-O-methylguanosine-3'-phosphate
  modified_base 16: mod_base = OTHER; note = 2'-O-methyladenosine-3'-phosphate
  modified_base 17: mod_base = OTHER; note = 2'-O-methyladenosine-3'-phosphate
  modified_base 18: mod_base = OTHER; note = 2'-O-methylguanosine-3'-phosphate
  modified_base 19: mod_base = OTHER; note = 2'-O-methylguanosine-3'-phosphate
  modified_base 20: mod_base = OTHER; note = 2'-O-methyladenosine-3'-phosphate
  modified_base 21: mod_base = OTHER; note = 2'-O-methyladenosine-3'-phosphate ((2S,4R)-1-[29-[[2-(acetylamino)-2-deoxy-beta-D-galactopyra nosyl]oxy]-14,14-bis[[3-[[3-[[5-[[2-(acetylamino)-2-deoxy-b eta-D-galactopyranosyl]oxy]-1-oxopentyl]amino]propyl]amino] -3-oxopropoxy]methyl]-1,12,19,25-tetraoxo-16-oxa-13,20,24-t riazanonacos-1-yl]-4-hydroxy-2-pyrrolidinyl)methyl ester
atcaatttcgagcagaaggaa

SEQ ID NO: 1070 - RNA, 21 nt, synthetic construct
  source 1..21: mol_type = other RNA
  modified_base 1: mod_base = OTHER; note = 2'-O-methyluridine-3'-phosphorothioate
  modified_base 2: mod_base = OTHER; note = 2'-O-methylcytidine-3'-phosphorothioate
  modified_base 3: mod_base = OTHER; note = 2'-O-methyladenosine-3'-phosphate
  modified_base 4: mod_base = OTHER; note = 2'-O-methyladenosine-3'-phosphate
  modified_base 5: mod_base = OTHER; note = 2'-O-methyluridine-3'-phosphate
  modified_base 6: mod_base = OTHER; note = 2'-O-hexadecyl-uridine-3'-phosphate
  modified_base 7: mod_base = OTHER; note = 2'-deoxy-2'-fluorouridine-3'-phosphate
  modified_base 8: mod_base = OTHER; note = 2'-O-methylcytidine-3'-phosphate
  modified_base 9: mod_base = OTHER; note = 2'-deoxy-2'-fluoroguanosine-3'-phosphate
  modified_base 10: mod_base = OTHER; note = 2'-deoxy-2'-fluoroadenosine-3'-phosphate
  modified_base 11: mod_base = OTHER; note = 2'-deoxy-2'-fluoroguanosine-3'-phosphate
  modified_base 12: mod_base = OTHER; note = 2'-O-methylcytidine-3'-phosphate
  modified_base 13: mod_base = OTHER; note = 2'-O-methyladenosine-3'-phosphate
  modified_base 14: mod_base = OTHER; note = 2'-O-methylguanosine-3'-phosphate
  modified_base 15: mod_base = OTHER; note = 2'-O-methyladenosine-3'-phosphate
  modified_base 16: mod_base = OTHER; note = 2'-O-methyladenosine-3'-phosphate
  modified_base 17: mod_base = OTHER; note = 2'-O-methylguanosine-3'-phosphate
  modified_base 18: mod_base = OTHER; note = 2'-O-methylguanosine-3'-phosphate
  modified_base 19: mod_base = OTHER; note = 2'-O-methyladenosine-3'-phosphate
  modified_base 20: mod_base = OTHER; note = 2'-O-methyladenosine-3'-phosphate
  modified_base 21: mod_base = OTHER; note = 2'-O-methyladenosine-3'-phosphate ((2S,4R)-1-[29-[[2-(acetylamino)-2-deoxy-beta-D-galactopyra nosyl]oxy]-14,14-bis[[3-[[3-[[5-[[2-(acetylamino)-2-deoxy-b eta-D-galactopyranosyl]oxy]-1-oxopentyl]amino]propyl]amino] -3-oxopropoxy]methyl]-1,12,19,25-tetraoxo-16-oxa-13,20,24-t riazanonacos-1-yl]-4-hydroxy-2-pyrrolidinyl)methyl ester
tcaatttcgagcagaaggaaa

SEQ ID NO: 1071 - RNA, 21 nt, synthetic construct
  source 1..21: mol_type = other RNA
  modified_base 1: mod_base = OTHER; note = 2'-O-methylcytidine-3'-phosphorothioate
  modified_base 2: mod_base = OTHER; note = 2'-O-methyladenosine-3'-phosphorothioate
  modified_base 3: mod_base = OTHER; note = 2'-O-methyladenosine-3'-phosphate
  modified_base 4: mod_base = OTHER; note = 2'-O-methyluridine-3'-phosphate
  modified_base 5: mod_base = OTHER; note = 2'-O-methyluridine-3'-phosphate
  modified_base 6: mod_base = OTHER; note = 2'-O-hexadecyl-uridine-3'-phosphate
  modified_base 7: mod_base = OTHER; note = 2'-deoxy-2'-fluorocytidine-3'-phosphate
  modified_base 8: mod_base = OTHER; note = 2'-O-methylguanosine-3'-phosphate
  modified_base 9: mod_base = OTHER; note = 2'-deoxy-2'-fluoroadenosine-3'-phosphate
  modified_base 10: mod_base = OTHER; note = 2'-deoxy-2'-fluoroguanosine-3'-phosphate
  modified_base 11: mod_base = OTHER; note = 2'-deoxy-2'-fluorocytidine-3'-phosphate
  modified_base 12: mod_base = OTHER; note = 2'-O-methyladenosine-3'-phosphate
  modified_base 13: mod_base = OTHER; note = 2'-O-methylguanosine-3'-phosphate
  modified_base 14: mod_base = OTHER; note = 2'-O-methyladenosine-3'-phosphate
  modified_base 15: mod_base = OTHER; note = 2'-O-methyladenosine-3'-phosphate
  modified_base 16: mod_base = OTHER; note = 2'-O-methylguanosine-3'-phosphate
  modified_base 17: mod_base = OTHER; note = 2'-O-methylguanosine-3'-phosphate
  modified_base 18: mod_base = OTHER; note = 2'-O-methyladenosine-3'-phosphate
  modified_base 19: mod_base = OTHER; note = 2'-O-methyladenosine-3'-phosphate
  modified_base 20: mod_base = OTHER; note = 2'-O-methyladenosine-3'-phosphate
  modified_base 21: mod_base = OTHER; note = 2'-O-methyluridine-3'-phosphate ((2S,4R)-1-[29-[[2-(acetylamino)-2-deoxy-beta-D-galactopyra nosyl]oxy]-14,14-bis[[3-[[3-[[5-[[2-(acetylamino)-2-deoxy-b eta-D-galactopyranosyl]oxy]-1-oxopentyl]amino]propyl]amino] -3-oxopropoxy]methyl]-1,12,19,25-tetraoxo-16-oxa-13,20,24-t riazanonacos-1-yl]-4-hydroxy-2-pyrrolidinyl)methyl ester
caatttcgagcagaaggaaat

SEQ ID NO: 1072 - RNA, 21 nt, synthetic construct
  source 1..21: mol_type = other RNA
  modified_base 1: mod_base = OTHER; note = 2'-O-methyladenosine-3'-phosphorothioate
  modified_base 2: mod_base = OTHER; note = 2'-O-methyladenosine-3'-phosphorothioate
  modified_base 3: mod_base = OTHER; note = 2'-O-methyluridine-3'-phosphate
  modified_base 4: mod_base = OTHER; note = 2'-O-methyluridine-3'-phosphate
  modified_base 5: mod_base = OTHER; note = 2'-O-methyluridine-3'-phosphate
  modified_base 6: mod_base = OTHER; note = 2'-O-hexadecyl-cytidine-3'-phosphate
  modified_base 7: mod_base = OTHER; note = 2'-deoxy-2'-fluoroguanosine-3'-phosphate
  modified_base 8: mod_base = OTHER; note = 2'-O-methyladenosine-3'-phosphate
  modified_base 9: mod_base = OTHER; note = 2'-deoxy-2'-fluoroguanosine-3'-phosphate
  modified_base 10: mod_base = OTHER; note = 2'-deoxy-2'-fluorocytidine-3'-phosphate
  modified_base 11: mod_base = OTHER; note = 2'-deoxy-2'-fluoroadenosine-3'-phosphate
  modified_base 12: mod_base = OTHER; note = 2'-O-methylguanosine-3'-phosphate
  modified_base 13: mod_base = OTHER; note = 2'-O-methyladenosine-3'-phosphate
  modified_base 14: mod_base = OTHER; note = 2'-O-methyladenosine-3'-phosphate
  modified_base 15: mod_base = OTHER; note = 2'-O-methylguanosine-3'-phosphate
  modified_base 16: mod_base = OTHER; note = 2'-O-methylguanosine-3'-phosphate
  modified_base 17: mod_base = OTHER; note = 2'-O-methyladenosine-3'-phosphate
  modified_base 18: mod_base = OTHER; note = 2'-O-methyladenosine-3'-phosphate
  modified_base 19: mod_base = OTHER; note = 2'-O-methyladenosine-3'-phosphate
  modified_base 20: mod_base = OTHER; note = 2'-O-methylguanosine-3'-phosphate
  modified_base 21: mod_base = OTHER; note = 2'-O-methyluridine-3'-phosphate ((2S,4R)-1-[29-[[2-(acetylamino)-2-deoxy-beta-D-galactopyra nosyl]oxy]-14,14-bis[[3-[[3-[[5-[[2-(acetylamino)-2-deoxy-b eta-D-galactopyranosyl]oxy]-1-oxopentyl]amino]propyl]amino] -3-oxopropoxy]methyl]-1,12,19,25-tetraoxo-16-oxa-13,20,24-t riazanonacos-1-yl]-4-hydroxy-2-pyrrolidinyl)methyl ester
aatttcgagcagaaggaaagt

SEQ ID NO: 1073 - RNA, 21 nt, synthetic construct
  source 1..21: mol_type = other RNA
  modified_base 1: mod_base = OTHER; note = 2'-O-methyladenosine-3'-phosphorothioate
  modified_base 2: mod_base = OTHER; note = 2'-O-methyluridine-3'-phosphorothioate
  modified_base 3: mod_base = OTHER; note = 2'-O-methyluridine-3'-phosphate
  modified_base 4: mod_base = OTHER; note = 2'-O-methyluridine-3'-phosphate
  modified_base 5: mod_base = OTHER; note = 2'-O-methylcytidine-3'-phosphate
  modified_base 6: mod_base = OTHER; note = 2'-O-hexadecyl-guanosine-3'-phosphate
  modified_base 7: mod_base = OTHER; note = 2'-deoxy-2'-fluoroadenosine-3'-phosphate
  modified_base 8: mod_base = OTHER; note = 2'-O-methylguanosine-3'-phosphate
  modified_base 9: mod_base = OTHER; note = 2'-deoxy-2'-fluorocytidine-3'-phosphate
  modified_base 10: mod_base = OTHER; note = 2'-deoxy-2'-fluoroadenosine-3'-phosphate
  modified_base 11: mod_base = OTHER; note = 2'-deoxy-2'-fluoroguanosine-3'-phosphate
  modified_base 12: mod_base = OTHER; note = 2'-O-methyladenosine-3'-phosphate
  modified_base 13: mod_base = OTHER; note = 2'-O-methyladenosine-3'-phosphate
  modified_base 14: mod_base = OTHER; note = 2'-O-methylguanosine-3'-phosphate
  modified_base 15: mod_base = OTHER; note = 2'-O-methylguanosine-3'-phosphate
  modified_base 16: mod_base = OTHER; note = 2'-O-methyladenosine-3'-phosphate
  modified_base 17: mod_base = OTHER; note = 2'-O-methyladenosine-3'-phosphate
  modified_base 18: mod_base = OTHER; note = 2'-O-methyladenosine-3'-phosphate
  modified_base 19: mod_base = OTHER; note = 2'-O-methylguanosine-3'-phosphate
  modified_base 20: mod_base = OTHER; note = 2'-O-methyluridine-3'-phosphate
  modified_base 21: mod_base = OTHER; note = 2'-O-methyladenosine-3'-phosphate ((2S,4R)-1-[29-[[2-(acetylamino)-2-deoxy-beta-D-galactopyra nosyl]oxy]-14,14-bis[[3-[[3-[[5-[[2-(acetylamino)-2-deoxy-b eta-D-galactopyranosyl]oxy]-1-oxopentyl]amino]propyl]amino] -3-oxopropoxy]methyl]-1,12,19,25-tetraoxo-16-oxa-13,20,24-t riazanonacos-1-yl]-4-hydroxy-2-pyrrolidinyl)methyl ester
atttcgagcagaaggaaagta

SEQ ID NO: 1074 - RNA, 21 nt, synthetic construct
  source 1..21: mol_type = other RNA
  modified_base 1: mod_base = OTHER; note = 2'-O-methyluridine-3'-phosphorothioate
  modified_base 2: mod_base = OTHER; note = 2'-O-methyluridine-3'-phosphorothioate
  modified_base 3: mod_base = OTHER; note = 2'-O-methyluridine-3'-phosphate
  modified_base 4: mod_base = OTHER; note = 2'-O-methylcytidine-3'-phosphate
  modified_base 5: mod_base = OTHER; note = 2'-O-methylguanosine-3'-phosphate
  modified_base 6: mod_base = OTHER; note = 2'-O-hexadecyl-adenosine-3'-phosphate
  modified_base 7: mod_base = OTHER; note = 2'-deoxy-2'-fluoroguanosine-3'-phosphate
  modified_base 8: mod_base = OTHER; note = 2'-O-methylcytidine-3'-phosphate
  modified_base 9: mod_base = OTHER; note = 2'-deoxy-2'-fluoroadenosine-3'-phosphate
  modified_base 10: mod_base = OTHER; note = 2'-deoxy-2'-fluoroguanosine-3'-phosphate
  modified_base 11: mod_base = OTHER; note = 2'-deoxy-2'-fluoroadenosine-3'-phosphate
  modified_base 12: mod_base = OTHER; note = 2'-O-methyladenosine-3'-phosphate
  modified_base 13: mod_base = OTHER; note = 2'-O-methylguanosine-3'-phosphate
  modified_base 14: mod_base = OTHER; note = 2'-O-methylguanosine-3'-phosphate
  modified_base 15: mod_base = OTHER; note = 2'-O-methyladenosine-3'-phosphate
  modified_base 16: mod_base = OTHER; note = 2'-O-methyladenosine-3'-phosphate
  modified_base 17: mod_base = OTHER; note = 2'-O-methyladenosine-3'-phosphate
  modified_base 18: mod_base = OTHER; note = 2'-O-methylguanosine-3'-phosphate
  modified_base 19: mod_base = OTHER; note = 2'-O-methyluridine-3'-phosphate
  modified_base 20: mod_base = OTHER; note = 2'-O-methyladenosine-3'-phosphate
  modified_base 21: mod_base = OTHER; note = 2'-O-methyladenosine-3'-phosphate ((2S,4R)-1-[29-[[2-(acetylamino)-2-deoxy-beta-D-galactopyra nosyl]oxy]-14,14-bis[[3-[[3-[[5-[[2-(acetylamino)-2-deoxy-b eta-D-galactopyranosyl]oxy]-1-oxopentyl]amino]propyl]amino] -3-oxopropoxy]methyl]-1,12,19,25-tetraoxo-16-oxa-13,20,24-t riazanonacos-1-yl]-4-hydroxy-2-pyrrolidinyl)methyl ester
tttcgagcagaaggaaagtaa

SEQ ID NO: 1075 - RNA, 21 nt, synthetic construct
  source 1..21: mol_type = other RNA
  modified_base 1: mod_base = OTHER; note = 2'-O-methyluridine-3'-phosphorothioate
  modified_base 2: mod_base = OTHER; note = 2'-O-methyluridine-3'-phosphorothioate
  modified_base 3: mod_base = OTHER; note = 2'-O-methylcytidine-3'-phosphate
  modified_base 4: mod_base = OTHER; note = 2'-O-methylguanosine-3'-phosphate
  modified_base 5: mod_base = OTHER; note = 2'-O-methyladenosine-3'-phosphate
  modified_base 6: mod_base = OTHER; note = 2'-O-hexadecyl-guanosine-3'-phosphate
  modified_base 7: mod_base = OTHER; note = 2'-deoxy-2'-fluorocytidine-3'-phosphate
  modified_base 8: mod_base = OTHER; note = 2'-O-methyladenosine-3'-phosphate
  modified_base 9: mod_base = OTHER; note = 2'-deoxy-2'-fluoroguanosine-3'-phosphate
  modified_base 10: mod_base = OTHER; note = 2'-deoxy-2'-fluoroadenosine-3'-phosphate
  modified_base 11: mod_base = OTHER; note = 2'-deoxy-2'-fluoroadenosine-3'-phosphate
  modified_base 12: mod_base = OTHER; note = 2'-O-methylguanosine-3'-phosphate
  modified_base 13: mod_base = OTHER; note = 2'-O-methylguanosine-3'-phosphate
  modified_base 14: mod_base = OTHER; note = 2'-O-methyladenosine-3'-phosphate
  modified_base 15: mod_base = OTHER; note = 2'-O-methyladenosine-3'-phosphate
  modified_base 16: mod_base = OTHER; note = 2'-O-methyladenosine-3'-phosphate
  modified_base 17: mod_base = OTHER; note = 2'-O-methylguanosine-3'-phosphate
  modified_base 18: mod_base = OTHER; note = 2'-O-methyluridine-3'-phosphate
  modified_base 19: mod_base = OTHER; note = 2'-O-methyladenosine-3'-phosphate
  modified_base 20: mod_base = OTHER; note = 2'-O-methyladenosine-3'-phosphate
  modified_base 21: mod_base = OTHER; note = 2'-O-methyluridine-3'-phosphate ((2S,4R)-1-[29-[[2-(acetylamino)-2-deoxy-beta-D-galactopyra nosyl]oxy]-14,14-bis[[3-[[3-[[5-[[2-(acetylamino)-2-deoxy-b eta-D-galactopyranosyl]oxy]-1-oxopentyl]amino]propyl]amino] -3-oxopropoxy]methyl]-1,12,19,25-tetraoxo-16-oxa-13,20,24-t riazanonacos-1-yl]-4-hydroxy-2-pyrrolidinyl)methyl ester
ttcgagcagaaggaaagtaat

SEQ ID NO: 1076 - RNA, 21 nt, synthetic construct
  source 1..21: mol_type = other RNA
  modified_base 1: mod_base = OTHER; note = 2'-O-methyluridine-3'-phosphorothioate
  modified_base 2: mod_base = OTHER; note = 2'-O-methylcytidine-3'-phosphorothioate
  modified_base 3: mod_base = OTHER; note = 2'-O-methylguanosine-3'-phosphate
  modified_base 4: mod_base = OTHER; note = 2'-O-methyladenosine-3'-phosphate
  modified_base 5: mod_base = OTHER; note = 2'-O-methylguanosine-3'-phosphate
  modified_base 6: mod_base = OTHER; note = 2'-O-hexadecyl-cytidine-3'-phosphate
  modified_base 7: mod_base = OTHER; note = 2'-deoxy-2'-fluoroadenosine-3'-phosphate
  modified_base 8: mod_base = OTHER; note = 2'-O-methylguanosine-3'-phosphate
  modified_base 9: mod_base = OTHER; note = 2'-deoxy-2'-fluoroadenosine-3'-phosphate
  modified_base 10: mod_base = OTHER; note = 2'-deoxy-2'-fluoroadenosine-3'-phosphate
  modified_base 11: mod_base = OTHER; note = 2'-deoxy-2'-fluoroguanosine-3'-phosphate
  modified_base 12: mod_base = OTHER; note = 2'-O-methylguanosine-3'-phosphate
  modified_base 13: mod_base = OTHER; note = 2'-O-methyladenosine-3'-phosphate
  modified_base 14: mod_base = OTHER; note = 2'-O-methyladenosine-3'-phosphate
  modified_base 15: mod_base = OTHER; note = 2'-O-methyladenosine-3'-phosphate
  modified_base 16: mod_base = OTHER; note = 2'-O-methylguanosine-3'-phosphate
  modified_base 17: mod_base = OTHER; note = 2'-O-methyluridine-3'-phosphate
  modified_base 18: mod_base = OTHER; note = 2'-O-methyladenosine-3'-phosphate
  modified_base 19: mod_base = OTHER; note = 2'-O-methyladenosine-3'-phosphate
  modified_base 20: mod_base = OTHER; note = 2'-O-methyluridine-3'-phosphate
  modified_base 21: mod_base = OTHER; note = 2'-O-methyluridine-3'-phosphate ((2S,4R)-1-[29-[[2-(acetylamino)-2-deoxy-beta-D-galactopyra nosyl]oxy]-14,14-bis[[3-[[3-[[5-[[2-(acetylamino)-2-deoxy-b eta-D-galactopyranosyl]oxy]-1-oxopentyl]amino]propyl]amino] -3-oxopropoxy]methyl]-1,12,19,25-tetraoxo-16-oxa-13,20,24-t riazanonacos-1-yl]-4-hydroxy-2-pyrrolidinyl)methyl ester
tcgagcagaaggaaagtaatt

SEQ ID NO: 1077 - RNA, 21 nt, synthetic construct
  source 1..21: mol_type = other RNA
  modified_base 1: mod_base = OTHER; note = 2'-O-methylcytidine-3'-phosphorothioate
  modified_base 2: mod_base = OTHER; note = 2'-O-methylguanosine-3'-phosphorothioate
  modified_base 3: mod_base = OTHER; note = 2'-O-methyladenosine-3'-phosphate
  modified_base 4: mod_base = OTHER; note = 2'-O-methylguanosine-3'-phosphate
  modified_base 5: mod_base = OTHER; note = 2'-O-methylcytidine-3'-phosphate
  modified_base 6: mod_base = OTHER; note = 2'-O-hexadecyl-adenosine-3'-phosphate
  modified_base 7: mod_base = OTHER; note = 2'-deoxy-2'-fluoroguanosine-3'-phosphate
  modified_base 8: mod_base = OTHER; note = 2'-O-methyladenosine-3'-phosphate
  modified_base 9: mod_base = OTHER; note = 2'-deoxy-2'-fluoroadenosine-3'-phosphate
  modified_base 10: mod_base = OTHER; note = 2'-deoxy-2'-fluoroguanosine-3'-phosphate
  modified_base 11: mod_base = OTHER; note = 2'-deoxy-2'-fluoroguanosine-3'-phosphate
  modified_base 12: mod_base = OTHER; note = 2'-O-methyladenosine-3'-phosphate
  modified_base 13: mod_base = OTHER; note = 2'-O-methyladenosine-3'-phosphate
  modified_base 14: mod_base = OTHER; note = 2'-O-methyladenosine-3'-phosphate
  modified_base 15: mod_base = OTHER; note = 2'-O-methylguanosine-3'-phosphate
  modified_base 16: mod_base = OTHER; note = 2'-O-methyluridine-3'-phosphate
  modified_base 17: mod_base = OTHER; note = 2'-O-methyladenosine-3'-phosphate
  modified_base 18: mod_base = OTHER; note = 2'-O-methyladenosine-3'-phosphate
  modified_base 19: mod_base = OTHER; note = 2'-O-methyluridine-3'-phosphate
  modified_base 20: mod_base = OTHER; note = 2'-O-methylguanosine-3'-phosphate
  modified_base 21: mod_base = OTHER; note = 2'-O-methyluridine-3'-phosphate ((2S,4R)-1-[29-[[2-(acetylamino)-2-deoxy-beta-D-galactopyra nosyl]oxy]-14,14-bis[[3-[[3-[[5-[[2-(acetylamino)-2-deoxy-b eta-D-galactopyranosyl]oxy]-1-oxopentyl]amino]propyl]amino] -3-oxopropoxy]methyl]-1,12,19,25-tetraoxo-16-oxa-13,20,24-t riazanonacos-1-yl]-4-hydroxy-2-pyrrolidinyl)methyl ester
cgagcagaaggaaagtaatgt

SEQ ID NO: 1078 - RNA, 21 nt, synthetic construct
  source 1..21: mol_type = other RNA
  modified_base 1: mod_base = OTHER; note = 2'-O-methylguanosine-3'-phosphorothioate
  modified_base 2: mod_base = OTHER; note = 2'-O-methyladenosine-3'-phosphorothioate
  modified_base 3: mod_base = OTHER; note = 2'-O-methylguanosine-3'-phosphate
  modified_base 4: mod_base = OTHER; note = 2'-O-methylcytidine-3'-phosphate
  modified_base 5: mod_base = OTHER; note = 2'-O-methyladenosine-3'-phosphate
  modified_base 6: mod_base = OTHER; note = 2'-O-hexadecyl-guanosine-3'-phosphate
  modified_base 7: mod_base = OTHER; note = 2'-deoxy-2'-fluoroadenosine-3'-phosphate
  modified_base 8: mod_base = OTHER; note = 2'-O-methyladenosine-3'-phosphate
  modified_base 9: mod_base = OTHER; note = 2'-deoxy-2'-fluoroguanosine-3'-phosphate
  modified_base 10: mod_base = OTHER; note = 2'-deoxy-2'-fluoroguanosine-3'-phosphate
  modified_base 11: mod_base = OTHER; note = 2'-deoxy-2'-fluoroadenosine-3'-phosphate
  modified_base 12: mod_base = OTHER; note = 2'-O-methyladenosine-3'-phosphate
  modified_base 13: mod_base = OTHER; note = 2'-O-methyladenosine-3'-phosphate
  modified_base 14: mod_base = OTHER; note = 2'-O-methylguanosine-3'-phosphate
  modified_base 15: mod_base = OTHER; note = 2'-O-methyluridine-3'-phosphate
  modified_base 16: mod_base = OTHER; note = 2'-O-methyladenosine-3'-phosphate
  modified_base 17: mod_base = OTHER; note = 2'-O-methyladenosine-3'-phosphate
  modified_base 18: mod_base = OTHER; note = 2'-O-methyluridine-3'-phosphate
  modified_base 19: mod_base = OTHER; note = 2'-O-methylguanosine-3'-phosphate
  modified_base 20: mod_base = OTHER; note = 2'-O-methylguanosine-3'-phosphate
  modified_base 21: mod_base = OTHER; note = 2'-O-methyladenosine-3'-phosphate ((2S,4R)-1-[29-[[2-(acetylamino)-2-deoxy-beta-D-galactopyra nosyl]oxy]-14,14-bis[[3-[[3-[[5-[[2-(acetylamino)-2-deoxy-b eta-D-galactopyranosyl]oxy]-1-oxopentyl]amino]propyl]amino] -3-oxopropoxy]methyl]-1,12,19,25-tetraoxo-16-oxa-13,20,24-t riazanonacos-1-yl]-4-hydroxy-2-pyrrolidinyl)methyl ester
gagcagaaggaaagtaatgga

SEQ ID NO: 1079 - RNA, 21 nt, synthetic construct
  source 1..21: mol_type = other RNA
  modified_base 1: mod_base = OTHER; note = 2'-O-methyladenosine-3'-phosphorothioate
  modified_base 2: mod_base = OTHER; note = 2'-O-methylguanosine-3'-phosphorothioate
  modified_base 3: mod_base = OTHER; note = 2'-O-methylcytidine-3'-phosphate
  modified_base 4: mod_base = OTHER; note = 2'-O-methyladenosine-3'-phosphate
  modified_base 5: mod_base = OTHER; note = 2'-O-methylguanosine-3'-phosphate
  modified_base 6: mod_base = OTHER; note = 2'-O-hexadecyl-adenosine-3'-phosphate
  modified_base 7: mod_base = OTHER; note = 2'-deoxy-2'-fluoroadenosine-3'-phosphate
  modified_base 8: mod_base = OTHER; note = 2'-O-methylguanosine-3'-phosphate
  modified_base 9: mod_base = OTHER; note = 2'-deoxy-2'-fluoroguanosine-3'-phosphate
  modified_base 10: mod_base = OTHER; note = 2'-deoxy-2'-fluoroadenosine-3'-phosphate
  modified_base 11: mod_base = OTHER; note = 2'-deoxy-2'-fluoroadenosine-3'-phosphate
  modified_base 12: mod_base = OTHER; note = 2'-O-methyladenosine-3'-phosphate
  modified_base 13: mod_base = OTHER; note = 2'-O-methylguanosine-3'-phosphate
  modified_base 14: mod_base = OTHER; note = 2'-O-methyluridine-3'-phosphate
  modified_base 15: mod_base = OTHER; note = 2'-O-methyladenosine-3'-phosphate
  modified_base 16: mod_base = OTHER; note = 2'-O-methyladenosine-3'-phosphate
  modified_base 17: mod_base = OTHER; note = 2'-O-methyluridine-3'-phosphate
  modified_base 18: mod_base = OTHER; note = 2'-O-methylguanosine-3'-phosphate
  modified_base 19: mod_base = OTHER; note = 2'-O-methylguanosine-3'-phosphate
  modified_base 20: mod_base = OTHER; note = 2'-O-methyladenosine-3'-phosphate
  modified_base 21: mod_base = OTHER; note = 2'-O-methyluridine-3'-phosphate ((2S,4R)-1-[29-[[2-(acetylamino)-2-deoxy-beta-D-galactopyra nosyl]oxy]-14,14-bis[[3-[[3-[[5-[[2-(acetylamino)-2-deoxy-b eta-D-galactopyranosyl]oxy]-1-oxopentyl]amino]propyl]amino] -3-oxopropoxy]methyl]-1,12,19,25-tetraoxo-16-oxa-13,20,24-t riazanonacos-1-yl]-4-hydroxy-2-pyrrolidinyl)methyl ester
agcagaaggaaagtaatggat

SEQ ID NO: 1080 - RNA, 21 nt, synthetic construct
  source 1..21: mol_type = other RNA
  modified_base 1: mod_base = OTHER; note = 2'-O-methylguanosine-3'-phosphorothioate
  modified_base 2: mod_base = OTHER; note = 2'-O-methylcytidine-3'-phosphorothioate
  modified_base 3: mod_base = OTHER; note = 2'-O-methyladenosine-3'-phosphate
  modified_base 4: mod_base = OTHER; note = 2'-O-methylguanosine-3'-phosphate
  modified_base 5: mod_base = OTHER; note = 2'-O-methyladenosine-3'-phosphate
  modified_base 6: mod_base = OTHER; note = 2'-O-hexadecyl-adenosine-3'-phosphate
  modified_base 7: mod_base = OTHER; note = 2'-deoxy-2'-fluoroguanosine-3'-phosphate
  modified_base 8: mod_base = OTHER; note = 2'-O-methylguanosine-3'-phosphate
  modified_base 9: mod_base = OTHER; note = 2'-deoxy-2'-fluoroadenosine-3'-phosphate
  modified_base 10: mod_base = OTHER; note = 2'-deoxy-2'-fluoroadenosine-3'-phosphate
  modified_base 11: mod_base = OTHER; note = 2'-deoxy-2'-fluoroadenosine-3'-phosphate
  modified_base 12: mod_base = OTHER; note = 2'-O-methylguanosine-3'-phosphate
  modified_base 13: mod_base = OTHER; note = 2'-O-methyluridine-3'-phosphate
  modified_base 14: mod_base = OTHER; note = 2'-O-methyladenosine-3'-phosphate
  modified_base 15: mod_base = OTHER; note = 2'-O-methyladenosine-3'-phosphate
  modified_base 16: mod_base = OTHER; note = 2'-O-methyluridine-3'-phosphate
  modified_base 17: mod_base = OTHER; note = 2'-O-methylguanosine-3'-phosphate
  modified_base 18: mod_base = OTHER; note = 2'-O-methylguanosine-3'-phosphate
  modified_base 19: mod_base = OTHER; note = 2'-O-methyladenosine-3'-phosphate
  modified_base 20: mod_base = OTHER; note = 2'-O-methylcytidine-3'-phosphate
  modified_base 21: mod_base = OTHER; note = 2'-O-methyluridine-3'-phosphate ((2S,4R)-1-[29-[[2-(acetylamino)-2-deoxy-beta-D-galactopyra nosyl]oxy]-14,14-bis[[3-[[3-[[5-[[2-(acetylamino)-2-deoxy-b eta-D-galactopyranosyl]oxy]-1-oxopentyl]amino]propyl]amino] -3-oxopropoxy]methyl]-1,12,19,25-tetraoxo-16-oxa-13,20,24-t riazanonacos-1-yl]-4-hydroxy-2-pyrrolidinyl)methyl ester
gcagaaggaaagtaatggact

SEQ ID NO: 1081 - RNA, 21 nt, synthetic construct
  source 1..21: mol_type = other RNA
  modified_base 1: mod_base = OTHER; note = 2'-O-methylcytidine-3'-phosphorothioate
  modified_base 2: mod_base = OTHER; note = 2'-O-methyladenosine-3'-phosphorothioate
  modified_base 3: mod_base = OTHER; note = 2'-O-methylguanosine-3'-phosphate
  modified_base 4: mod_base = OTHER; note = 2'-O-methyladenosine-3'-phosphate
  modified_base 5: mod_base = OTHER; note = 2'-O-methyladenosine-3'-phosphate
  modified_base 6: mod_base = OTHER; note = 2'-O-hexadecyl-guanosine-3'-phosphate
  modified_base 7: mod_base = OTHER; note = 2'-deoxy-2'-fluoroguanosine-3'-phosphate
  modified_base 8: mod_base = OTHER; note = 2'-O-methyladenosine-3'-phosphate
  modified_base 9: mod_base = OTHER; note = 2'-deoxy-2'-fluoroadenosine-3'-phosphate
  modified_base 10: mod_base = OTHER; note = 2'-deoxy-2'-fluoroadenosine-3'-phosphate
  modified_base 11: mod_base = OTHER; note = 2'-deoxy-2'-fluoroguanosine-3'-phosphate
  modified_base 12: mod_base = OTHER; note = 2'-O-methyluridine-3'-phosphate
  modified_base 13: mod_base = OTHER; note = 2'-O-methyladenosine-3'-phosphate
  modified_base 14: mod_base = OTHER; note = 2'-O-methyladenosine-3'-phosphate
  modified_base 15: mod_base = OTHER; note = 2'-O-methyluridine-3'-phosphate
  modified_base 16: mod_base = OTHER; note = 2'-O-methylguanosine-3'-phosphate
  modified_base 17: mod_base = OTHER; note = 2'-O-methylguanosine-3'-phosphate
  modified_base 18: mod_base = OTHER; note = 2'-O-methyladenosine-3'-phosphate
  modified_base 19: mod_base = OTHER; note = 2'-O-methylcytidine-3'-phosphate
  modified_base 20: mod_base = OTHER; note = 2'-O-methylcytidine-3'-phosphate
  modified_base 21: mod_base = OTHER; note = 2'-O-methyladenosine-3'-phosphate ((2S,4R)-1-[29-[[2-(acetylamino)-2-deoxy-beta-D-galactopyra nosyl]oxy]-14,14-bis[[3-[[3-[[5-[[2-(acetylamino)-2-deoxy-b eta-D-galactopyranosyl]oxy]-1-oxopentyl]amino]propyl]amino] -3-oxopropoxy]methyl]-1,12,19,25-tetraoxo-16-oxa-13,20,24-t riazanonacos-1-yl]-4-hydroxy-2-pyrrolidinyl)methyl ester
cagaaggaaagtaatggacca

SEQ ID NO: 1082 - RNA, 21 nt, synthetic construct
  source 1..21: mol_type = other RNA
  modified_base 1: mod_base = OTHER; note = 2'-O-methyladenosine-3'-phosphorothioate
  modified_base 2: mod_base = OTHER; note = 2'-O-methylguanosine-3'-phosphorothioate
  modified_base 3: mod_base = OTHER; note = 2'-O-methyladenosine-3'-phosphate
  modified_base 4: mod_base = OTHER; note = 2'-O-methyladenosine-3'-phosphate
  modified_base 5: mod_base = OTHER; note = 2'-O-methylguanosine-3'-phosphate
  modified_base 6: mod_base = OTHER; note = 2'-O-hexadecyl-guanosine-3'-phosphate
  modified_base 7: mod_base = OTHER; note = 2'-deoxy-2'-fluoroadenosine-3'-phosphate
  modified_base 8: mod_base = OTHER; note = 2'-O-methyladenosine-3'-phosphate
  modified_base 9: mod_base = OTHER; note = 2'-deoxy-2'-fluoroadenosine-3'-phosphate
  modified_base 10: mod_base = OTHER; note = 2'-deoxy-2'-fluoroguanosine-3'-phosphate
  modified_base 11: mod_base = OTHER; note = 2'-deoxy-2'-fluorouridine-3'-phosphate
  modified_base 12: mod_base = OTHER; note = 2'-O-methyladenosine-3'-phosphate
  modified_base 13: mod_base = OTHER; note = 2'-O-methyladenosine-3'-phosphate
  modified_base 14: mod_base = OTHER; note = 2'-O-methyluridine-3'-phosphate
  modified_base 15: mod_base = OTHER; note = 2'-O-methylguanosine-3'-phosphate
  modified_base 16: mod_base = OTHER; note = 2'-O-methylguanosine-3'-phosphate
  modified_base 17: mod_base = OTHER; note = 2'-O-methyladenosine-3'-phosphate
  modified_base 18: mod_base = OTHER; note = 2'-O-methylcytidine-3'-phosphate
  modified_base 19: mod_base = OTHER; note = 2'-O-methylcytidine-3'-phosphate
  modified_base 20: mod_base = OTHER; note = 2'-O-methyladenosine-3'-phosphate
  modified_base 21: mod_base = OTHER; note = 2'-O-methyluridine-3'-phosphate ((2S,4R)-1-[29-[[2-(acetylamino)-2-deoxy-beta-D-galactopyra nosyl]oxy]-14,14-bis[[3-[[3-[[5-[[2-(acetylamino)-2-deoxy-b eta-D-galactopyranosyl]oxy]-1-oxopentyl]amino]propyl]amino] -3-oxopropoxy]methyl]-1,12,19,25-tetraoxo-16-oxa-13,20,24-t riazanonacos-1-yl]-4-hydroxy-2-pyrrolidinyl)methyl ester
agaaggaaagtaatggaccat

SEQ ID NO: 1083 - RNA, 21 nt, synthetic construct
  source 1..21: mol_type = other RNA
  modified_base 1: mod_base = OTHER; note = 2'-O-methylguanosine-3'-phosphorothioate
  modified_base 2: mod_base = OTHER; note = 2'-O-methyladenosine-3'-phosphorothioate
  modified_base 3: mod_base = OTHER; note = 2'-O-methyladenosine-3'-phosphate
  modified_base 4: mod_base = OTHER; note = 2'-O-methylguanosine-3'-phosphate
  modified_base 5: mod_base = OTHER; note = 2'-O-methylguanosine-3'-phosphate
  modified_base 6: mod_base = OTHER; note = 2'-O-hexadecyl-adenosine-3'-phosphate
  modified_base 7: mod_base = OTHER; note = 2'-deoxy-2'-fluoroadenosine-3'-phosphate
  modified_base 8: mod_base = OTHER; note = 2'-O-methyladenosine-3'-phosphate
  modified_base 9: mod_base = OTHER; note = 2'-deoxy-2'-fluoroguanosine-3'-phosphate
  modified_base 10: mod_base = OTHER; note = 2'-deoxy-2'-fluorouridine-3'-phosphate
  modified_base 11: mod_base = OTHER; note = 2'-deoxy-2'-fluoroadenosine-3'-phosphate
  modified_base 12: mod_base = OTHER; note = 2'-O-methyladenosine-3'-phosphate
  modified_base 13: mod_base = OTHER; note = 2'-O-methyluridine-3'-phosphate
  modified_base 14: mod_base = OTHER; note = 2'-O-methylguanosine-3'-phosphate
  modified_base 15: mod_base = OTHER; note = 2'-O-methylguanosine-3'-phosphate
  modified_base 16: mod_base = OTHER; note = 2'-O-methyladenosine-3'-phosphate
  modified_base 17: mod_base = OTHER; note = 2'-O-methylcytidine-3'-phosphate
  modified_base 18: mod_base = OTHER; note = 2'-O-methylcytidine-3'-phosphate
  modified_base 19: mod_base = OTHER; note = 2'-O-methyladenosine-3'-phosphate
  modified_base 20: mod_base = OTHER; note = 2'-O-methylguanosine-3'-phosphate
  modified_base 21: mod_base = OTHER; note = 2'-O-methyluridine-3'-phosphate ((2S,4R)-1-[29-[[2-(acetylamino)-2-deoxy-beta-D-galactopyra nosyl]oxy]-14,14-bis[[3-[[3-[[5-[[2-(acetylamino)-2-deoxy-b eta-D-galactopyranosyl]oxy]-1-oxopentyl]amino]propyl]amino] -3-oxopropoxy]methyl]-1,12,19,25-tetraoxo-16-oxa-13,20,24-t riazanonacos-1-yl]-4-hydroxy-2-pyrrolidinyl)methyl ester
gaaggaaagtaatggaccagt

SEQ ID NO: 1084 - RNA, 21 nt, synthetic construct
  source 1..21: mol_type = other RNA
  modified_base 1: mod_base = OTHER; note = 2'-O-methyladenosine-3'-phosphorothioate
  modified_base 2: mod_base = OTHER; note = 2'-O-methyladenosine-3'-phosphorothioate
  modified_base 3: mod_base = OTHER; note = 2'-O-methylguanosine-3'-phosphate
  modified_base 4: mod_base = OTHER; note = 2'-O-methylguanosine-3'-phosphate
  modified_base 5: mod_base = OTHER; note = 2'-O-methyladenosine-3'-phosphate
  modified_base 6: mod_base = OTHER; note = 2'-O-hexadecyl-adenosine-3'-phosphate
  modified_base 7: mod_base = OTHER; note = 2'-deoxy-2'-fluoroadenosine-3'-phosphate
  modified_base 8: mod_base = OTHER; note = 2'-O-methylguanosine-3'-phosphate
  modified_base 9: mod_base = OTHER; note = 2'-deoxy-2'-fluorouridine-3'-phosphate
  modified_base 10: mod_base = OTHER; note = 2'-deoxy-2'-fluoroadenosine-3'-phosphate
  modified_base 11: mod_base = OTHER; note = 2'-deoxy-2'-fluoroadenosine-3'-phosphate
  modified_base 12: mod_base = OTHER; note = 2'-O-methyluridine-3'-phosphate
  modified_base 13: mod_base = OTHER; note = 2'-O-methylguanosine-3'-phosphate
  modified_base 14: mod_base = OTHER; note = 2'-O-methylguanosine-3'-phosphate
  modified_base 15: mod_base = OTHER; note = 2'-O-methyladenosine-3'-phosphate
  modified_base 16: mod_base = OTHER; note = 2'-O-methylcytidine-3'-phosphate
  modified_base 17: mod_base = OTHER; note = 2'-O-methylcytidine-3'-phosphate
  modified_base 18: mod_base = OTHER; note = 2'-O-methyladenosine-3'-phosphate
  modified_base 19: mod_base = OTHER; note = 2'-O-methylguanosine-3'-phosphate
  modified_base 20: mod_base = OTHER; note = 2'-O-methyluridine-3'-phosphate
  modified_base 21: mod_base = OTHER; note = 2'-O-methyluridine-3'-phosphate ((2S,4R)-1-[29-[[2-(acetylamino)-2-deoxy-beta-D-galactopyra nosyl]oxy]-14,14-bis[[3-[[3-[[5-[[2-(acetylamino)-2-deoxy-b eta-D-galactopyranosyl]oxy]-1-oxopentyl]amino]propyl]amino] -3-oxopropoxy]methyl]-1,12,19,25-tetraoxo-16-oxa-13,20,24-t riazanonacos-1-yl]-4-hydroxy-2-pyrrolidinyl)methyl ester
aaggaaagtaatggaccagtt

SEQ ID NO: 1085 - RNA, 21 nt, synthetic construct
  source 1..21: mol_type = other RNA
  modified_base 1: mod_base = OTHER; note = 2'-O-methyladenosine-3'-phosphorothioate
  modified_base 2: mod_base = OTHER; note = 2'-O-methylguanosine-3'-phosphorothioate
  modified_base 3: mod_base = OTHER; note = 2'-O-methylguanosine-3'-phosphate
  modified_base 4: mod_base = OTHER; note = 2'-O-methyladenosine-3'-phosphate
  modified_base 5: mod_base = OTHER; note = 2'-O-methyladenosine-3'-phosphate
  modified_base 6: mod_base = OTHER; note = 2'-O-hexadecyl-adenosine-3'-phosphate
  modified_base 7: mod_base = OTHER; note = 2'-deoxy-2'-fluoroguanosine-3'-phosphate
  modified_base 8: mod_base = OTHER; note = 2'-O-methyluridine-3'-phosphate
  modified_base 9: mod_base = OTHER; note = 2'-deoxy-2'-fluoroadenosine-3'-phosphate
  modified_base 10: mod_base = OTHER; note = 2'-deoxy-2'-fluoroadenosine-3'-phosphate
  modified_base 11: mod_base = OTHER; note = 2'-deoxy-2'-fluorouridine-3'-phosphate
  modified_base 12: mod_base = OTHER; note = 2'-O-methylguanosine-3'-phosphate
  modified_base 13: mod_base = OTHER; note = 2'-O-methylguanosine-3'-phosphate
  modified_base 14: mod_base = OTHER; note = 2'-O-methyladenosine-3'-phosphate
  modified_base 15: mod_base = OTHER; note = 2'-O-methylcytidine-3'-phosphate
  modified_base 16: mod_base = OTHER; note = 2'-O-methylcytidine-3'-phosphate
  modified_base 17: mod_base = OTHER; note = 2'-O-methyladenosine-3'-phosphate
  modified_base 18: mod_base = OTHER; note = 2'-O-methylguanosine-3'-phosphate
  modified_base 19: mod_base = OTHER; note = 2'-O-methyluridine-3'-phosphate
  modified_base 20: mod_base = OTHER; note = 2'-O-methylguanosine-3'-phosphate
  modified_base 21: mod_base = OTHER; note = 2'-O-methyladenosine-3'-phosphate ((2S,4R)-1-[29-[[2-(acetylamino)-2-deoxy-beta-D-galactopyra nosyl]oxy]-14,14-bis[[3-[[3-[[5-[[2-(acetylamino)-2-deoxy-b eta-D-galactopyranosyl]oxy]-1-oxopentyl]amino]propyl]amino] -3-oxopropoxy]methyl]-1,12,19,25-tetraoxo-16-oxa-13,20,24-t riazanonacos-1-yl]-4-hydroxy-2-pyrrolidinyl)methyl ester
aggaaagtaatggaccagtga

SEQ ID NO: 1086 - RNA, 21 nt, synthetic construct
  source 1..21: mol_type = other RNA
  modified_base 1: mod_base = OTHER; note = 2'-O-methylguanosine-3'-phosphorothioate
  modified_base 2: mod_base = OTHER; note = 2'-O-methylguanosine-3'-phosphorothioate
  modified_base 3: mod_base = OTHER; note = 2'-O-methyladenosine-3'-phosphate
  modified_base 4: mod_base = OTHER; note = 2'-O-methyladenosine-3'-phosphate
  modified_base 5: mod_base = OTHER; note = 2'-O-methyladenosine-3'-phosphate
  modified_base 6: mod_base = OTHER; note = 2'-O-hexadecyl-guanosine-3'-phosphate
  modified_base 7: mod_base = OTHER; note = 2'-deoxy-2'-fluorouridine-3'-phosphate
  modified_base 8: mod_base = OTHER; note = 2'-O-methyladenosine-3'-phosphate
  modified_base 9: mod_base = OTHER; note = 2'-deoxy-2'-fluoroadenosine-3'-phosphate
  modified_base 10: mod_base = OTHER; note = 2'-deoxy-2'-fluorouridine-3'-phosphate
  modified_base 11: mod_base = OTHER; note = 2'-deoxy-2'-fluoroguanosine-3'-phosphate
  modified_base 12: mod_base = OTHER; note = 2'-O-methylguanosine-3'-phosphate
  modified_base 13: mod_base = OTHER; note = 2'-O-methyladenosine-3'-phosphate
  modified_base 14: mod_base = OTHER; note = 2'-O-methylcytidine-3'-phosphate
  modified_base 15: mod_base = OTHER; note = 2'-O-methylcytidine-3'-phosphate
  modified_base 16: mod_base = OTHER; note = 2'-O-methyladenosine-3'-phosphate
  modified_base 17: mod_base = OTHER; note = 2'-O-methylguanosine-3'-phosphate
  modified_base 18: mod_base = OTHER; note = 2'-O-methyluridine-3'-phosphate
  modified_base 19: mod_base = OTHER; note = 2'-O-methylguanosine-3'-phosphate
  modified_base 20: mod_base = OTHER; note = 2'-O-methyladenosine-3'-phosphate
  modified_base 21: mod_base = OTHER; note = 2'-O-methyladenosine-3'-phosphate ((2S,4R)-1-[29-[[2-(acetylamino)-2-deoxy-beta-D-galactopyra nosyl]oxy]-14,14-bis[[3-[[3-[[5-[[2-(acetylamino)-2-deoxy-b eta-D-galactopyranosyl]oxy]-1-oxopentyl]amino]propyl]amino] -3-oxopropoxy]methyl]-1,12,19,25-tetraoxo-16-oxa-13,20,24-t riazanonacos-1-yl]-4-hydroxy-2-pyrrolidinyl)methyl ester
ggaaagtaatggaccagtgaa

SEQ ID NO: 1087 - RNA, 21 nt, synthetic construct
  source 1..21: mol_type = other RNA
  modified_base 1: mod_base = OTHER; note = 2'-O-methylguanosine-3'-phosphorothioate
  modified_base 2: mod_base = OTHER; note = 2'-O-methyladenosine-3'-phosphorothioate
  modified_base 3: mod_base = OTHER; note = 2'-O-methyladenosine-3'-phosphate
  modified_base 4: mod_base = OTHER; note = 2'-O-methyladenosine-3'-phosphate
  modified_base 5: mod_base = OTHER; note = 2'-O-methylguanosine-3'-phosphate
  modified_base 6: mod_base = OTHER; note = 2'-O-hexadecyl-uridine-3'-phosphate
  modified_base 7: mod_base = OTHER; note = 2'-deoxy-2'-fluoroadenosine-3'-phosphate
  modified_base 8: mod_base = OTHER; note = 2'-O-methyladenosine-3'-phosphate
  modified_base 9: mod_base = OTHER; note = 2'-deoxy-2'-fluorouridine-3'-phosphate
  modified_base 10: mod_base = OTHER; note = 2'-deoxy-2'-fluoroguanosine-3'-phosphate
  modified_base 11: mod_base = OTHER; note = 2'-deoxy-2'-fluoroguanosine-3'-phosphate
  modified_base 12: mod_base = OTHER; note = 2'-O-methyladenosine-3'-phosphate
  modified_base 13: mod_base = OTHER; note = 2'-O-methylcytidine-3'-phosphate
  modified_base 14: mod_base = OTHER; note = 2'-O-methylcytidine-3'-phosphate
  modified_base 15: mod_base = OTHER; note = 2'-O-methyladenosine-3'-phosphate
  modified_base 16: mod_base = OTHER; note = 2'-O-methylguanosine-3'-phosphate
  modified_base 17: mod_base = OTHER; note = 2'-O-methyluridine-3'-phosphate
  modified_base 18: mod_base = OTHER; note = 2'-O-methylguanosine-3'-phosphate
  modified_base 19: mod_base = OTHER; note = 2'-O-methyladenosine-3'-phosphate
  modified_base 20: mod_base = OTHER; note = 2'-O-methyladenosine-3'-phosphate
  modified_base 21: mod_base = OTHER; note = 2'-O-methyluridine-3'-phosphate ((2S,4R)-1-[29-[[2-(acetylamino)-2-deoxy-beta-D-galactopyra nosyl]oxy]-14,14-bis[[3-[[3-[[5-[[2-(acetylamino)-2-deoxy-b eta-D-galactopyranosyl]oxy]-1-oxopentyl]amino]propyl]amino] -3-oxopropoxy]methyl]-1,12,19,25-tetraoxo-16-oxa-13,20,24-t riazanonacos-1-yl]-4-hydroxy-2-pyrrolidinyl)methyl ester
gaaagtaatggaccagtgaat

SEQ ID NO: 1088 - RNA, 21 nt, synthetic construct
  source 1..21: mol_type = other RNA
  modified_base 1: mod_base = OTHER; note = 2'-O-methyladenosine-3'-phosphorothioate
  modified_base 2: mod_base = OTHER; note = 2'-O-methyladenosine-3'-phosphorothioate
  modified_base 3: mod_base = OTHER; note = 2'-O-methyladenosine-3'-phosphate
  modified_base 4: mod_base = OTHER; note = 2'-O-methylguanosine-3'-phosphate
  modified_base 5: mod_base = OTHER; note = 2'-O-methyluridine-3'-phosphate
  modified_base 6: mod_base = OTHER; note = 2'-O-hexadecyl-adenosine-3'-phosphate
  modified_base 7: mod_base = OTHER; note = 2'-deoxy-2'-fluoroadenosine-3'-phosphate
  modified_base 8: mod_base = OTHER; note = 2'-O-methyluridine-3'-phosphate
  modified_base 9: mod_base = OTHER; note = 2'-deoxy-2'-fluoroguanosine-3'-phosphate
  modified_base 10: mod_base = OTHER; note = 2'-deoxy-2'-fluoroguanosine-3'-phosphate
  modified_base 11: mod_base = OTHER; note = 2'-deoxy-2'-fluoroadenosine-3'-phosphate
  modified_base 12: mod_base = OTHER; note = 2'-O-methylcytidine-3'-phosphate
  modified_base 13: mod_base = OTHER; note = 2'-O-methylcytidine-3'-phosphate
  modified_base 14: mod_base = OTHER; note = 2'-O-methyladenosine-3'-phosphate
  modified_base 15: mod_base = OTHER; note = 2'-O-methylguanosine-3'-phosphate
  modified_base 16: mod_base = OTHER; note = 2'-O-methyluridine-3'-phosphate
  modified_base 17: mod_base = OTHER; note = 2'-O-methylguanosine-3'-phosphate
  modified_base 18: mod_base = OTHER; note = 2'-O-methyladenosine-3'-phosphate
  modified_base 19: mod_base = OTHER; note = 2'-O-methyladenosine-3'-phosphate
  modified_base 20: mod_base = OTHER; note = 2'-O-methylguanosine-3'-phosphate
  modified_base 21: mod_base = OTHER; note = 2'-O-methyluridine-3'-phosphate ((2S,4R)-1-[29-[[2-(acetylamino)-2-deoxy-beta-D-galactopyra nosyl]oxy]-14,14-bis[[3-[[3-[[5-[[2-(acetylamino)-2-deoxy-b eta-D-galactopyranosyl]oxy]-1-oxopentyl]amino]propyl]amino] -3-oxopropoxy]methyl]-1,12,19,25-tetraoxo-16-oxa-13,20,24-t riazanonacos-1-yl]-4-hydroxy-2-pyrrolidinyl)methyl ester
aaagtaatggaccagtgaagt

SEQ ID NO: 1089 - RNA, 21 nt, synthetic construct
  source 1..21: mol_type = other RNA
  modified_base 1: mod_base = OTHER; note = 2'-O-methyladenosine-3'-phosphorothioate
  modified_base 2: mod_base = OTHER; note = 2'-O-methyladenosine-3'-phosphorothioate
  modified_base 3: mod_base = OTHER; note = 2'-O-methylguanosine-3'-phosphate
  modified_base 4: mod_base = OTHER; note = 2'-O-methyluridine-3'-phosphate
  modified_base 5: mod_base = OTHER; note = 2'-O-methyladenosine-3'-phosphate
  modified_base 6: mod_base = OTHER; note = 2'-O-hexadecyl-adenosine-3'-phosphate
  modified_base 7: mod_base = OTHER; note = 2'-deoxy-2'-fluorouridine-3'-phosphate
  modified_base 8: mod_base = OTHER; note = 2'-O-methylguanosine-3'-phosphate
  modified_base 9: mod_base = OTHER; note = 2'-deoxy-2'-fluoroguanosine-3'-phosphate
  modified_base 10: mod_base = OTHER; note = 2'-deoxy-2'-fluoroadenosine-3'-phosphate
  modified_base 11: mod_base = OTHER; note = 2'-deoxy-2'-fluorocytidine-3'-phosphate
  modified_base 12: mod_base = OTHER; note = 2'-O-methylcytidine-3'-phosphate
  modified_base 13: mod_base = OTHER; note = 2'-O-methyladenosine-3'-phosphate
  modified_base 14: mod_base = OTHER; note = 2'-O-methylguanosine-3'-phosphate
  modified_base 15: mod_base = OTHER; note = 2'-O-methyluridine-3'-phosphate
  modified_base 16: mod_base = OTHER; note = 2'-O-methylguanosine-3'-phosphate
  modified_base 17: mod_base = OTHER; note = 2'-O-methyladenosine-3'-phosphate
  modified_base 18: mod_base = OTHER; note = 2'-O-methyladenosine-3'-phosphate
  modified_base 19: mod_base = OTHER; note = 2'-O-methylguanosine-3'-phosphate
  modified_base 20: mod_base = OTHER; note = 2'-O-methylguanosine-3'-phosphate
  modified_base 21: mod_base = OTHER; note = 2'-O-methyluridine-3'-phosphate ((2S,4R)-1-[29-[[2-(acetylamino)-2-deoxy-beta-D-galactopyra nosyl]oxy]-14,14-bis[[3-[[3-[[5-[[2-(acetylamino)-2-deoxy-b eta-D-galactopyranosyl]oxy]-1-oxopentyl]amino]propyl]amino] -3-oxopropoxy]methyl]-1,12,19,25-tetraoxo-16-oxa-13,20,24-t riazanonacos-1-yl]-4-hydroxy-2-pyrrolidinyl)methyl ester
aagtaatggaccagtgaaggt

SEQ ID NO: 1090 - RNA, 21 nt, synthetic construct
  source 1..21: mol_type = other RNA
  modified_base 1: mod_base = OTHER; note = 2'-O-methyladenosine-3'-phosphorothioate
  modified_base 2: mod_base = OTHER; note = 2'-O-methylguanosine-3'-phosphorothioate
  modified_base 3: mod_base = OTHER; note = 2'-O-methyluridine-3'-phosphate
  modified_base 4: mod_base = OTHER; note = 2'-O-methyladenosine-3'-phosphate
  modified_base 5: mod_base = OTHER; note = 2'-O-methyladenosine-3'-phosphate
  modified_base 6: mod_base = OTHER; note = 2'-O-hexadecyl-uridine-3'-phosphate
  modified_base 7: mod_base = OTHER; note = 2'-deoxy-2'-fluoroguanosine-3'-phosphate
  modified_base 8: mod_base = OTHER; note = 2'-O-methylguanosine-3'-phosphate
  modified_base 9: mod_base = OTHER; note = 2'-deoxy-2'-fluoroadenosine-3'-phosphate
  modified_base 10: mod_base = OTHER; note = 2'-deoxy-2'-fluorocytidine-3'-phosphate
  modified_base 11: mod_base = OTHER; note = 2'-deoxy-2'-fluorocytidine-3'-phosphate
  modified_base 12: mod_base = OTHER; note = 2'-O-methyladenosine-3'-phosphate
  modified_base 13: mod_base = OTHER; note = 2'-O-methylguanosine-3'-phosphate
  modified_base 14: mod_base = OTHER; note = 2'-O-methyluridine-3'-phosphate
  modified_base 15: mod_base = OTHER; note = 2'-O-methylguanosine-3'-phosphate
  modified_base 16: mod_base = OTHER; note = 2'-O-methyladenosine-3'-phosphate
  modified_base 17: mod_base = OTHER; note = 2'-O-methyladenosine-3'-phosphate
  modified_base 18: mod_base = OTHER; note = 2'-O-methylguanosine-3'-phosphate
  modified_base 19: mod_base = OTHER; note = 2'-O-methylguanosine-3'-phosphate
  modified_base 20: mod_base = OTHER; note = 2'-O-methyluridine-3'-phosphate
  modified_base 21: mod_base = OTHER; note = 2'-O-methyluridine-3'-phosphate ((2S,4R)-1-[29-[[2-(acetylamino)-2-deoxy-beta-D-galactopyra nosyl]oxy]-14,14-bis[[3-[[3-[[5-[[2-(acetylamino)-2-deoxy-b eta-D-galactopyranosyl]oxy]-1-oxopentyl]amino]propyl]amino] -3-oxopropoxy]methyl]-1,12,19,25-tetraoxo-16-oxa-13,20,24-t riazanonacos-1-yl]-4-hydroxy-2-pyrrolidinyl)methyl ester
agtaatggaccagtgaaggtt

SEQ ID NO: 1091 - RNA, 21 nt, synthetic construct
  source 1..21: mol_type = other RNA
  modified_base 1: mod_base = OTHER; note = 2'-O-methylguanosine-3'-phosphorothioate
  modified_base 2: mod_base = OTHER; note = 2'-O-methyluridine-3'-phosphorothioate
  modified_base 3: mod_base = OTHER; note = 2'-O-methyladenosine-3'-phosphate
  modified_base 4: mod_base = OTHER; note = 2'-O-methyladenosine-3'-phosphate
  modified_base 5: mod_base = OTHER; note = 2'-O-methyluridine-3'-phosphate
  modified_base 6: mod_base = OTHER; note = 2'-O-hexadecyl-guanosine-3'-phosphate
  modified_base 7: mod_base = OTHER; note = 2'-deoxy-2'-fluoroguanosine-3'-phosphate
  modified_base 8: mod_base = OTHER; note = 2'-O-methyladenosine-3'-phosphate
  modified_base 9: mod_base = OTHER; note = 2'-deoxy-2'-fluorocytidine-3'-phosphate
  modified_base 10: mod_base = OTHER; note = 2'-deoxy-2'-fluorocytidine-3'-phosphate
  modified_base 11: mod_base = OTHER; note = 2'-deoxy-2'-fluoroadenosine-3'-phosphate
  modified_base 12: mod_base = OTHER; note = 2'-O-methylguanosine-3'-phosphate
  modified_base 13: mod_base = OTHER; note = 2'-O-methyluridine-3'-phosphate
  modified_base 14: mod_base = OTHER; note = 2'-O-methylguanosine-3'-phosphate
  modified_base 15: mod_base = OTHER; note = 2'-O-methyladenosine-3'-phosphate
  modified_base 16: mod_base = OTHER; note = 2'-O-methyladenosine-3'-phosphate
  modified_base 17: mod_base = OTHER; note = 2'-O-methylguanosine-3'-phosphate
  modified_base 18: mod_base = OTHER; note = 2'-O-methylguanosine-3'-phosphate
  modified_base 19: mod_base = OTHER; note = 2'-O-methyluridine-3'-phosphate
  modified_base 20: mod_base = OTHER; note = 2'-O-methylguanosine-3'-phosphate
  modified_base 21: mod_base = OTHER; note = 2'-O-methyluridine-3'-phosphate ((2S,4R)-1-[29-[[2-(acetylamino)-2-deoxy-beta-D-galactopyra nosyl]oxy]-14,14-bis[[3-[[3-[[5-[[2-(acetylamino)-2-deoxy-b eta-D-galactopyranosyl]oxy]-1-oxopentyl]amino]propyl]amino] -3-oxopropoxy]methyl]-1,12,19,25-tetraoxo-16-oxa-13,20,24-t riazanonacos-1-yl]-4-hydroxy-2-pyrrolidinyl)methyl ester
gtaatggaccagtgaaggtgt

SEQ ID NO: 1092 - RNA, 21 nt, synthetic construct
  source 1..21: mol_type = other RNA
  modified_base 1: mod_base = OTHER; note = 2'-O-methyluridine-3'-phosphorothioate
  modified_base 2: mod_base = OTHER; note = 2'-O-methyladenosine-3'-phosphorothioate
  modified_base 3: mod_base = OTHER; note = 2'-O-methyladenosine-3'-phosphate
  modified_base 4: mod_base = OTHER; note = 2'-O-methyluridine-3'-phosphate
  modified_base 5: mod_base = OTHER; note = 2'-O-methylguanosine-3'-phosphate
  modified_base 6: mod_base = OTHER; note = 2'-O-hexadecyl-guanosine-3'-phosphate
  modified_base 7: mod_base = OTHER; note = 2'-deoxy-2'-fluoroadenosine-3'-phosphate
  modified_base 8: mod_base = OTHER; note = 2'-O-methylcytidine-3'-phosphate
  modified_base 9: mod_base = OTHER; note = 2'-deoxy-2'-fluorocytidine-3'-phosphate
  modified_base 10: mod_base = OTHER; note = 2'-deoxy-2'-fluoroadenosine-3'-phosphate
  modified_base 11: mod_base = OTHER; note = 2'-deoxy-2'-fluoroguanosine-3'-phosphate
  modified_base 12: mod_base = OTHER; note = 2'-O-methyluridine-3'-phosphate
  modified_base 13: mod_base = OTHER; note = 2'-O-methylguanosine-3'-phosphate
  modified_base 14: mod_base = OTHER; note = 2'-O-methyladenosine-3'-phosphate
  modified_base 15: mod_base = OTHER; note = 2'-O-methyladenosine-3'-phosphate
  modified_base 16: mod_base = OTHER; note = 2'-O-methylguanosine-3'-phosphate
  modified_base 17: mod_base = OTHER; note = 2'-O-methylguanosine-3'-phosphate
  modified_base 18: mod_base = OTHER; note = 2'-O-methyluridine-3'-phosphate
  modified_base 19: mod_base = OTHER; note = 2'-O-methylguanosine-3'-phosphate
  modified_base 20: mod_base = OTHER; note = 2'-O-methyluridine-3'-phosphate
  modified_base 21: mod_base = OTHER; note = 2'-O-methyluridine-3'-phosphate ((2S,4R)-1-[29-[[2-(acetylamino)-2-deoxy-beta-D-galactopyra nosyl]oxy]-14,14-bis[[3-[[3-[[5-[[2-(acetylamino)-2-deoxy-b eta-D-galactopyranosyl]oxy]-1-oxopentyl]amino]propyl]amino] -3-oxopropoxy]methyl]-1,12,19,25-tetraoxo-16-oxa-13,20,24-t riazanonacos-1-yl]-4-hydroxy-2-pyrrolidinyl)methyl ester
taatggaccagtgaaggtgtt

SEQ ID NO: 1093 - RNA, 21 nt, synthetic construct
  source 1..21: mol_type = other RNA
  modified_base 1: mod_base = OTHER; note = 2'-O-methyladenosine-3'-phosphorothioate
  modified_base 2: mod_base = OTHER; note = 2'-O-methyladenosine-3'-phosphorothioate
  modified_base 3: mod_base = OTHER; note = 2'-O-methyluridine-3'-phosphate
  modified_base 4: mod_base = OTHER; note = 2'-O-methylguanosine-3'-phosphate
  modified_base 5: mod_base = OTHER; note = 2'-O-methylguanosine-3'-phosphate
  modified_base 6: mod_base = OTHER; note = 2'-O-hexadecyl-adenosine-3'-phosphate
  modified_base 7: mod_base = OTHER; note = 2'-deoxy-2'-fluorocytidine-3'-phosphate
  modified_base 8: mod_base = OTHER; note = 2'-O-methylcytidine-3'-phosphate
  modified_base 9: mod_base = OTHER; note = 2'-deoxy-2'-fluoroadenosine-3'-phosphate
  modified_base 10: mod_base = OTHER; note = 2'-deoxy-2'-fluoroguanosine-3'-phosphate
  modified_base 11: mod_base = OTHER; note = 2'-deoxy-2'-fluorouridine-3'-phosphate
  modified_base 12: mod_base = OTHER; note = 2'-O-methylguanosine-3'-phosphate
  modified_base 13: mod_base = OTHER; note = 2'-O-methyladenosine-3'-phosphate
  modified_base 14: mod_base = OTHER; note = 2'-O-methyladenosine-3'-phosphate
  modified_base 15: mod_base = OTHER; note = 2'-O-methylguanosine-3'-phosphate
  modified_base 16: mod_base = OTHER; note = 2'-O-methylguanosine-3'-phosphate
  modified_base 17: mod_base = OTHER; note = 2'-O-methyluridine-3'-phosphate
  modified_base 18: mod_base = OTHER; note = 2'-O-methylguanosine-3'-phosphate
  modified_base 19: mod_base = OTHER; note = 2'-O-methyluridine-3'-phosphate
  modified_base 20: mod_base = OTHER; note = 2'-O-methylguanosine-3'-phosphate
  modified_base 21: mod_base = OTHER; note = 2'-O-methyluridine-3'-phosphate ((2S,4R)-1-[29-[[2-(acetylamino)-2-deoxy-beta-D-galactopyra nosyl]oxy]-14,14-bis[[3-[[3-[[5-[[2-(acetylamino)-2-deoxy-b eta-D-galactopyranosyl]oxy]-1-oxopentyl]amino]propyl]amino] -3-oxopropoxy]methyl]-1,12,19,25-tetraoxo-16-oxa-13,20,24-t riazanonacos-1-yl]-4-hydroxy-2-pyrrolidinyl)methyl ester
aatggaccagtgaaggtgtgt

SEQ ID NO: 1094 - RNA, 21 nt, synthetic construct
  source 1..21: mol_type = other RNA
  modified_base 1: mod_base = OTHER; note = 2'-O-methylguanosine-3'-phosphorothioate
  modified_base 2: mod_base = OTHER; note = 2'-O-methyluridine-3'-phosphorothioate
  modified_base 3: mod_base = OTHER; note = 2'-O-methyladenosine-3'-phosphate
  modified_base 4: mod_base = OTHER; note = 2'-O-methylcytidine-3'-phosphate
  modified_base 5: mod_base = OTHER; note = 2'-O-methylcytidine-3'-phosphate
  modified_base 6: mod_base = OTHER; note = 2'-O-hexadecyl-adenosine-3'-phosphate
  modified_base 7: mod_base = OTHER; note = 2'-deoxy-2'-fluoroguanosine-3'-phosphate
  modified_base 8: mod_base = OTHER; note = 2'-O-methyluridine-3'-phosphate
  modified_base 9: mod_base = OTHER; note = 2'-deoxy-2'-fluoroguanosine-3'-phosphate
  modified_base 10: mod_base = OTHER; note = 2'-deoxy-2'-fluorocytidine-3'-phosphate
  modified_base 11: mod_base = OTHER; note = 2'-deoxy-2'-fluoroadenosine-3'-phosphate
  modified_base 12: mod_base = OTHER; note = 2'-O-methylguanosine-3'-phosphate
  modified_base 13: mod_base = OTHER; note = 2'-O-methylguanosine-3'-phosphate
  modified_base 14: mod_base = OTHER; note = 2'-O-methyluridine-3'-phosphate
  modified_base 15: mod_base = OTHER; note = 2'-O-methylcytidine-3'-phosphate
  modified_base 16: mod_base = OTHER; note = 2'-O-methylcytidine-3'-phosphate
  modified_base 17: mod_base = OTHER; note = 2'-O-methyluridine-3'-phosphate
  modified_base 18: mod_base = OTHER; note = 2'-O-methylcytidine-3'-phosphate
  modified_base 19: mod_base = OTHER; note = 2'-O-methyladenosine-3'-phosphate
  modified_base 20: mod_base = OTHER; note = 2'-O-methylcytidine-3'-phosphate
  modified_base 21: mod_base = OTHER; note = 2'-O-methyluridine-3'-phosphate ((2S,4R)-1-[29-[[2-(acetylamino)-2-deoxy-beta-D-galactopyra nosyl]oxy]-14,14-bis[[3-[[3-[[5-[[2-(acetylamino)-2-deoxy-b eta-D-galactopyranosyl]oxy]-1-oxopentyl]amino]propyl]amino] -3-oxopropoxy]methyl]-1,12,19,25-tetraoxo-16-oxa-13,20,24-t riazanonacos-1-yl]-4-hydroxy-2-pyrrolidinyl)methyl ester
gtaccagtgcaggtcctcact

SEQ ID NO: 1095 - RNA, 21 nt, synthetic construct
  source 1..21: mol_type = other RNA
  modified_base 1: mod_base = OTHER; note = 2'-O-methyluridine-3'-phosphorothioate
  modified_base 2: mod_base = OTHER; note = 2'-O-methyladenosine-3'-phosphorothioate
  modified_base 3: mod_base = OTHER; note = 2'-O-methylcytidine-3'-phosphate
  modified_base 4: mod_base = OTHER; note = 2'-O-methylcytidine-3'-phosphate
  modified_base 5: mod_base = OTHER; note = 2'-O-methyladenosine-3'-phosphate
  modified_base 6: mod_base = OTHER; note = 2'-O-hexadecyl-guanosine-3'-phosphate
  modified_base 7: mod_base = OTHER; note = 2'-deoxy-2'-fluorouridine-3'-phosphate
  modified_base 8: mod_base = OTHER; note = 2'-O-methylguanosine-3'-phosphate
  modified_base 9: mod_base = OTHER; note = 2'-deoxy-2'-fluorocytidine-3'-phosphate
  modified_base 10: mod_base = OTHER; note = 2'-deoxy-2'-fluoroadenosine-3'-phosphate
  modified_base 11: mod_base = OTHER; note = 2'-deoxy-2'-fluoroguanosine-3'-phosphate
  modified_base 12: mod_base = OTHER; note = 2'-O-methylguanosine-3'-phosphate
  modified_base 13: mod_base = OTHER; note = 2'-O-methyluridine-3'-phosphate
  modified_base 14: mod_base = OTHER; note = 2'-O-methylcytidine-3'-phosphate
  modified_base 15: mod_base = OTHER; note = 2'-O-methylcytidine-3'-phosphate
  modified_base 16: mod_base = OTHER; note = 2'-O-methyluridine-3'-phosphate
  modified_base 17: mod_base = OTHER; note = 2'-O-methylcytidine-3'-phosphate
  modified_base 18: mod_base = OTHER; note = 2'-O-methyladenosine-3'-phosphate
  modified_base 19: mod_base = OTHER; note = 2'-O-methylcytidine-3'-phosphate
  modified_base 20: mod_base = OTHER; note = 2'-O-methyluridine-3'-phosphate
  modified_base 21: mod_base = OTHER; note = 2'-O-methyluridine-3'-phosphate ((2S,4R)-1-[29-[[2-(acetylamino)-2-deoxy-beta-D-galactopyra nosyl]oxy]-14,14-bis[[3-[[3-[[5-[[2-(acetylamino)-2-deoxy-b eta-D-galactopyranosyl]oxy]-1-oxopentyl]amino]propyl]amino] -3-oxopropoxy]methyl]-1,12,19,25-tetraoxo-16-oxa-13,20,24-t riazanonacos-1-yl]-4-hydroxy-2-pyrrolidinyl)methyl ester
taccagtgcaggtcctcactt

SEQ ID NO: 1096 - RNA, 21 nt, synthetic construct
  source 1..21: mol_type = other RNA
  modified_base 1: mod_base = OTHER; note = 2'-O-methyladenosine-3'-phosphorothioate
  modified_base 2: mod_base = OTHER; note = 2'-O-methylcytidine-3'-phosphorothioate
  modified_base 3: mod_base = OTHER; note = 2'-O-methylcytidine-3'-phosphate
  modified_base 4: mod_base = OTHER; note = 2'-O-methyladenosine-3'-phosphate
  modified_base 5: mod_base = OTHER; note = 2'-O-methylguanosine-3'-phosphate
  modified_base 6: mod_base = OTHER; note = 2'-O-hexadecyl-uridine-3'-phosphate
  modified_base 7: mod_base = OTHER; note = 2'-deoxy-2'-fluoroguanosine-3'-phosphate
  modified_base 8: mod_base = OTHER; note = 2'-O-methylcytidine-3'-phosphate
  modified_base 9: mod_base = OTHER; note = 2'-deoxy-2'-fluoroadenosine-3'-phosphate
  modified_base 10: mod_base = OTHER; note = 2'-deoxy-2'-fluoroguanosine-3'-phosphate
  modified_base 11: mod_base = OTHER; note = 2'-deoxy-2'-fluoroguanosine-3'-phosphate
  modified_base 12: mod_base = OTHER; note = 2'-O-methyluridine-3'-phosphate
  modified_base 13: mod_base = OTHER; note = 2'-O-methylcytidine-3'-phosphate
  modified_base 14: mod_base = OTHER; note = 2'-O-methylcytidine-3'-phosphate
  modified_base 15: mod_base = OTHER; note = 2'-O-methyluridine-3'-phosphate
  modified_base 16: mod_base = OTHER; note = 2'-O-methylcytidine-3'-phosphate
  modified_base 17: mod_base = OTHER; note = 2'-O-methyladenosine-3'-phosphate
  modified_base 18: mod_base = OTHER; note = 2'-O-methylcytidine-3'-phosphate
  modified_base 19: mod_base = OTHER; note = 2'-O-methyluridine-3'-phosphate
  modified_base 20: mod_base = OTHER; note = 2'-O-methyluridine-3'-phosphate
  modified_base 21: mod_base = OTHER; note = 2'-O-methyluridine-3'-phosphate ((2S,4R)-1-[29-[[2-(acetylamino)-2-deoxy-beta-D-galactopyra nosyl]oxy]-14,14-bis[[3-[[3-[[5-[[2-(acetylamino)-2-deoxy-b eta-D-galactopyranosyl]oxy]-1-oxopentyl]amino]propyl]amino] -3-oxopropoxy]methyl]-1,12,19,25-tetraoxo-16-oxa-13,20,24-t riazanonacos-1-yl]-4-hydroxy-2-pyrrolidinyl)methyl ester
accagtgcaggtcctcacttt

SEQ ID NO: 1097 - RNA, 21 nt, synthetic construct
  source 1..21: mol_type = other RNA
  modified_base 1: mod_base = OTHER; note = 2'-O-methylcytidine-3'-phosphorothioate
  modified_base 2: mod_base = OTHER; note = 2'-O-methylcytidine-3'-phosphorothioate
  modified_base 3: mod_base = OTHER; note = 2'-O-methyladenosine-3'-phosphate
  modified_base 4: mod_base = OTHER; note = 2'-O-methylguanosine-3'-phosphate
  modified_base 5: mod_base = OTHER; note = 2'-O-methyluridine-3'-phosphate
  modified_base 6: mod_base = OTHER; note = 2'-O-hexadecyl-guanosine-3'-phosphate
  modified_base 7: mod_base = OTHER; note = 2'-deoxy-2'-fluorocytidine-3'-phosphate
  modified_base 8: mod_base = OTHER; note = 2'-O-methyladenosine-3'-phosphate
  modified_base 9: mod_base = OTHER; note = 2'-deoxy-2'-fluoroguanosine-3'-phosphate
  modified_base 10: mod_base = OTHER; note = 2'-deoxy-2'-fluoroguanosine-3'-phosphate
  modified_base 11: mod_base = OTHER; note = 2'-deoxy-2'-fluorouridine-3'-phosphate
  modified_base 12: mod_base = OTHER; note = 2'-O-methylcytidine-3'-phosphate
  modified_base 13: mod_base = OTHER; note = 2'-O-methylcytidine-3'-phosphate
  modified_base 14: mod_base = OTHER; note = 2'-O-methyluridine-3'-phosphate
  modified_base 15: mod_base = OTHER; note = 2'-O-methylcytidine-3'-phosphate
  modified_base 16: mod_base = OTHER; note = 2'-O-methyladenosine-3'-phosphate
  modified_base 17: mod_base = OTHER; note = 2'-O-methylcytidine-3'-phosphate
  modified_base 18: mod_base = OTHER; note = 2'-O-methyluridine-3'-phosphate
  modified_base 19: mod_base = OTHER; note = 2'-O-methyluridine-3'-phosphate
  modified_base 20: mod_base = OTHER; note = 2'-O-methyluridine-3'-phosphate
  modified_base 21: mod_base = OTHER; note = 2'-O-methyladenosine-3'-phosphate ((2S,4R)-1-[29-[[2-(acetylamino)-2-deoxy-beta-D-galactopyra nosyl]oxy]-14,14-bis[[3-[[3-[[5-[[2-(acetylamino)-2-deoxy-b eta-D-galactopyranosyl]oxy]-1-oxopentyl]amino]propyl]amino] -3-oxopropoxy]methyl]-1,12,19,25-tetraoxo-16-oxa-13,20,24-t riazanonacos-1-yl]-4-hydroxy-2-pyrrolidinyl)methyl ester
ccagtgcaggtcctcacttta

SEQ ID NO: 1098 - RNA, 21 nt, synthetic construct
  source 1..21: mol_type = other RNA
  modified_base 1: mod_base = OTHER; note = 2'-O-methylcytidine-3'-phosphorothioate
  modified_base 2: mod_base = OTHER; note = 2'-O-methyladenosine-3'-phosphorothioate
  modified_base 3: mod_base = OTHER; note = 2'-O-methylguanosine-3'-phosphate
  modified_base 4: mod_base = OTHER; note = 2'-O-methyluridine-3'-phosphate
  modified_base 5: mod_base = OTHER; note = 2'-O-methylguanosine-3'-phosphate
  modified_base 6: mod_base = OTHER; note = 2'-O-hexadecyl-cytidine-3'-phosphate
  modified_base 7: mod_base = OTHER; note = 2'-deoxy-2'-fluoroadenosine-3'-phosphate
  modified_base 8: mod_base = OTHER; note = 2'-O-methylguanosine-3'-phosphate
  modified_base 9: mod_base = OTHER; note = 2'-deoxy-2'-fluoroguanosine-3'-phosphate
  modified_base 10: mod_base = OTHER; note = 2'-deoxy-2'-fluorouridine-3'-phosphate
  modified_base 11: mod_base = OTHER; note = 2'-deoxy-2'-fluorocytidine-3'-phosphate
  modified_base 12: mod_base = OTHER; note = 2'-O-methylcytidine-3'-phosphate
  modified_base 13: mod_base = OTHER; note = 2'-O-methyluridine-3'-phosphate
  modified_base 14: mod_base = OTHER; note = 2'-O-methylcytidine-3'-phosphate
  modified_base 15: mod_base = OTHER; note = 2'-O-methyladenosine-3'-phosphate
  modified_base 16: mod_base = OTHER; note = 2'-O-methylcytidine-3'-phosphate
  modified_base 17: mod_base = OTHER; note = 2'-O-methyluridine-3'-phosphate
  modified_base 18: mod_base = OTHER; note = 2'-O-methyluridine-3'-phosphate
  modified_base 19: mod_base = OTHER; note = 2'-O-methyluridine-3'-phosphate
  modified_base 20: mod_base = OTHER; note = 2'-O-methyladenosine-3'-phosphate
  modified_base 21: mod_base = OTHER; note = 2'-O-methyladenosine-3'-phosphate ((2S,4R)-1-[29-[[2-(acetylamino)-2-deoxy-beta-D-galactopyra nosyl]oxy]-14,14-bis[[3-[[3-[[5-[[2-(acetylamino)-2-deoxy-b eta-D-galactopyranosyl]oxy]-1-oxopentyl]amino]propyl]amino] -3-oxopropoxy]methyl]-1,12,19,25-tetraoxo-16-oxa-13,20,24-t riazanonacos-1-yl]-4-hydroxy-2-pyrrolidinyl)methyl ester
cagtgcaggtcctcactttaa

SEQ ID NO: 1099 - RNA, 21 nt, synthetic construct
  source 1..21: mol_type = other RNA
  modified_base 1: mod_base = OTHER; note = 2'-O-methyladenosine-3'-phosphorothioate
  modified_base 2: mod_base = OTHER; note = 2'-O-methylguanosine-3'-phosphorothioate
  modified_base 3: mod_base = OTHER; note = 2'-O-methyluridine-3'-phosphate
  modified_base 4: mod_base = OTHER; note = 2'-O-methylguanosine-3'-phosphate
  modified_base 5: mod_base = OTHER; note = 2'-O-methylcytidine-3'-phosphate
  modified_base 6: mod_base = OTHER; note = 2'-O-hexadecyl-adenosine-3'-phosphate
  modified_base 7: mod_base = OTHER; note = 2'-deoxy-2'-fluoroguanosine-3'-phosphate
  modified_base 8: mod_base = OTHER; note = 2'-O-methylguanosine-3'-phosphate
  modified_base 9: mod_base = OTHER; note = 2'-deoxy-2'-fluorouridine-3'-phosphate
  modified_base 10: mod_base = OTHER; note = 2'-deoxy-2'-fluorocytidine-3'-phosphate
  modified_base 11: mod_base = OTHER; note = 2'-deoxy-2'-fluorocytidine-3'-phosphate
  modified_base 12: mod_base = OTHER; note = 2'-O-methyluridine-3'-phosphate
  modified_base 13: mod_base = OTHER; note = 2'-O-methylcytidine-3'-phosphate
  modified_base 14: mod_base = OTHER; note = 2'-O-methyladenosine-3'-phosphate
  modified_base 15: mod_base = OTHER; note = 2'-O-methylcytidine-3'-phosphate
  modified_base 16: mod_base = OTHER; note = 2'-O-methyluridine-3'-phosphate
  modified_base 17: mod_base = OTHER; note = 2'-O-methyluridine-3'-phosphate
  modified_base 18: mod_base = OTHER; note = 2'-O-methyluridine-3'-phosphate
  modified_base 19: mod_base = OTHER; note = 2'-O-methyladenosine-3'-phosphate
  modified_base 20: mod_base = OTHER; note = 2'-O-methyladenosine-3'-phosphate
  modified_base 21: mod_base = OTHER; note = 2'-O-methyluridine-3'-phosphate ((2S,4R)-1-[29-[[2-(acetylamino)-2-deoxy-beta-D-galactopyra nosyl]oxy]-14,14-bis[[3-[[3-[[5-[[2-(acetylamino)-2-deoxy-b eta-D-galactopyranosyl]oxy]-1-oxopentyl]amino]propyl]amino] -3-oxopropoxy]methyl]-1,12,19,25-tetraoxo-16-oxa-13,20,24-t riazanonacos-1-yl]-4-hydroxy-2-pyrrolidinyl)methyl ester
agtgcaggtcctcactttaat

SEQ ID NO: 1100 - RNA, 21 nt, synthetic construct
  source 1..21: mol_type = other RNA
  modified_base 1: mod_base = OTHER; note = 2'-O-methylguanosine-3'-phosphorothioate
  modified_base 2: mod_base = OTHER; note = 2'-O-methyluridine-3'-phosphorothioate
  modified_base 3: mod_base = OTHER; note = 2'-O-methylguanosine-3'-phosphate
  modified_base 4: mod_base = OTHER; note = 2'-O-methylcytidine-3'-phosphate
  modified_base 5: mod_base = OTHER; note = 2'-O-methyladenosine-3'-phosphate
  modified_base 6: mod_base = OTHER; note = 2'-O-hexadecyl-guanosine-3'-phosphate
  modified_base 7: mod_base = OTHER; note = 2'-deoxy-2'-fluoroguanosine-3'-phosphate
  modified_base 8: mod_base = OTHER; note = 2'-O-methyluridine-3'-phosphate
  modified_base 9: mod_base = OTHER; note = 2'-deoxy-2'-fluorocytidine-3'-phosphate
  modified_base 10: mod_base = OTHER; note = 2'-deoxy-2'-fluorocytidine-3'-phosphate
  modified_base 11: mod_base = OTHER; note = 2'-deoxy-2'-fluorouridine-3'-phosphate
  modified_base 12: mod_base = OTHER; note = 2'-O-methylcytidine-3'-phosphate
  modified_base 13: mod_base = OTHER; note = 2'-O-methyladenosine-3'-phosphate
  modified_base 14: mod_base = OTHER; note = 2'-O-methylcytidine-3'-phosphate
  modified_base 15: mod_base = OTHER; note = 2'-O-methyluridine-3'-phosphate
  modified_base 16: mod_base = OTHER; note = 2'-O-methyluridine-3'-phosphate
  modified_base 17: mod_base = OTHER; note = 2'-O-methyluridine-3'-phosphate
  modified_base 18: mod_base = OTHER; note = 2'-O-methyladenosine-3'-phosphate
  modified_base 19: mod_base = OTHER; note = 2'-O-methyladenosine-3'-phosphate
  modified_base 20: mod_base = OTHER; note = 2'-O-methyluridine-3'-phosphate
  modified_base 21: mod_base = OTHER; note = 2'-O-methyluridine-3'-phosphate ((2S,4R)-1-[29-[[2-(acetylamino)-2-deoxy-beta-D-galactopyra nosyl]oxy]-14,14-bis[[3-[[3-[[5-[[2-(acetylamino)-2-deoxy-b eta-D-galactopyranosyl]oxy]-1-oxopentyl]amino]propyl]amino] -3-oxopropoxy]methyl]-1,12,19,25-tetraoxo-16-oxa-13,20,24-t riazanonacos-1-yl]-4-hydroxy-2-pyrrolidinyl)methyl ester
gtgcaggtcctcactttaatt

SEQ ID NO: 1101 - RNA, 21 nt, synthetic construct
  source 1..21: mol_type = other RNA
  modified_base 1: mod_base = OTHER; note = 2'-O-methyluridine-3'-phosphorothioate
  modified_base 2: mod_base = OTHER; note = 2'-O-methylguanosine-3'-phosphorothioate
  modified_base 3: mod_base = OTHER; note = 2'-O-methylcytidine-3'-phosphate
  modified_base 4: mod_base = OTHER; note = 2'-O-methyladenosine-3'-phosphate
  modified_base 5: mod_base = OTHER; note = 2'-O-methylguanosine-3'-phosphate
  modified_base 6: mod_base = OTHER; note = 2'-O-hexadecyl-guanosine-3'-phosphate
  modified_base 7: mod_base = OTHER; note = 2'-deoxy-2'-fluorouridine-3'-phosphate
  modified_base 8: mod_base = OTHER; note = 2'-O-methylcytidine-3'-phosphate
  modified_base 9: mod_base = OTHER; note = 2'-deoxy-2'-fluorocytidine-3'-phosphate
  modified_base 10: mod_base = OTHER; note = 2'-deoxy-2'-fluorouridine-3'-phosphate
  modified_base 11: mod_base = OTHER; note = 2'-deoxy-2'-fluorocytidine-3'-phosphate
  modified_base 12: mod_base = OTHER; note = 2'-O-methyladenosine-3'-phosphate
  modified_base 13: mod_base = OTHER; note = 2'-O-methylcytidine-3'-phosphate
  modified_base 14: mod_base = OTHER; note = 2'-O-methyluridine-3'-phosphate
  modified_base 15: mod_base = OTHER; note = 2'-O-methyluridine-3'-phosphate
  modified_base 16: mod_base = OTHER; note = 2'-O-methyluridine-3'-phosphate
  modified_base 17: mod_base = OTHER; note = 2'-O-methyladenosine-3'-phosphate
  modified_base 18: mod_base = OTHER; note = 2'-O-methyladenosine-3'-phosphate
  modified_base 19: mod_base = OTHER; note = 2'-O-methyluridine-3'-phosphate
  modified_base 20: mod_base = OTHER; note = 2'-O-methylcytidine-3'-phosphate
  modified_base 21: mod_base = OTHER; note = 2'-O-methyluridine-3'-phosphate ((2S,4R)-1-[29-[[2-(acetylamino)-2-deoxy-beta-D-galactopyra nosyl]oxy]-14,14-bis[[3-[[3-[[5-[[2-(acetylamino)-2-deoxy-b eta-D-galactopyranosyl]oxy]-1-oxopentyl]amino]propyl]amino] -3-oxopropoxy]methyl]-1,12,19,25-tetraoxo-16-oxa-13,20,24-t riazanonacos-1-yl]-4-hydroxy-2-pyrrolidinyl)methyl ester
tgcaggtcctcactttaatct

SEQ ID NO: 1102 - RNA, 21 nt, synthetic construct
  source 1..21: mol_type = other RNA
  modified_base 1: mod_base = OTHER; note = 2'-O-methylguanosine-3'-phosphorothioate
  modified_base 2: mod_base = OTHER; note = 2'-O-methylcytidine-3'-phosphorothioate
  modified_base 3: mod_base = OTHER; note = 2'-O-methyladenosine-3'-phosphate
  modified_base 4: mod_base = OTHER; note = 2'-O-methylguanosine-3'-phosphate
  modified_base 5: mod_base = OTHER; note = 2'-O-methylguanosine-3'-phosphate
  modified_base 6: mod_base = OTHER; note = 2'-O-hexadecyl-uridine-3'-phosphate
  modified_base 7: mod_base = OTHER; note = 2'-deoxy-2'-fluorocytidine-3'-phosphate
  modified_base 8: mod_base = OTHER; note = 2'-O-methylcytidine-3'-phosphate
  modified_base 9: mod_base = OTHER; note = 2'-deoxy-2'-fluorouridine-3'-phosphate
  modified_base 10: mod_base = OTHER; note = 2'-deoxy-2'-fluorocytidine-3'-phosphate
  modified_base 11: mod_base = OTHER; note = 2'-deoxy-2'-fluoroadenosine-3'-phosphate
  modified_base 12: mod_base = OTHER; note = 2'-O-methylcytidine-3'-phosphate
  modified_base 13: mod_base = OTHER; note = 2'-O-methyluridine-3'-phosphate
  modified_base 14: mod_base = OTHER; note = 2'-O-methyluridine-3'-phosphate
  modified_base 15: mod_base = OTHER; note = 2'-O-methyluridine-3'-phosphate
  modified_base 16: mod_base = OTHER; note = 2'-O-methyladenosine-3'-phosphate
  modified_base 17: mod_base = OTHER; note = 2'-O-methyladenosine-3'-phosphate
  modified_base 18: mod_base = OTHER; note = 2'-O-methyluridine-3'-phosphate
  modified_base 19: mod_base = OTHER; note = 2'-O-methylcytidine-3'-phosphate
  modified_base 20: mod_base = OTHER; note = 2'-O-methylcytidine-3'-phosphate
  modified_base 21: mod_base = OTHER; note = 2'-O-methyluridine-3'-phosphate ((2S,4R)-1-[29-[[2-(acetylamino)-2-deoxy-beta-D-galactopyra nosyl]oxy]-14,14-bis[[3-[[3-[[5-[[2-(acetylamino)-2-deoxy-b eta-D-galactopyranosyl]oxy]-1-oxopentyl]amino]propyl]amino] -3-oxopropoxy]methyl]-1,12,19,25-tetraoxo-16-oxa-13,20,24-t riazanonacos-1-yl]-4-hydroxy-2-pyrrolidinyl)methyl ester
gcaggtcctcactttaatcct

SEQ ID NO: 1103 - RNA, 21 nt, synthetic construct
  source 1..21: mol_type = other RNA
  modified_base 1: mod_base = OTHER; note = 2'-O-methylcytidine-3'-phosphorothioate
  modified_base 2: mod_base = OTHER; note = 2'-O-methyladenosine-3'-phosphorothioate
  modified_base 3: mod_base = OTHER; note = 2'-O-methylguanosine-3'-phosphate
  modified_base 4: mod_base = OTHER; note = 2'-O-methylguanosine-3'-phosphate
  modified_base 5: mod_base = OTHER; note = 2'-O-methyluridine-3'-phosphate
  modified_base 6: mod_base = OTHER; note = 2'-O-hexadecyl-cytidine-3'-phosphate
  modified_base 7: mod_base = OTHER; note = 2'-deoxy-2'-fluorocytidine-3'-phosphate
  modified_base 8: mod_base = OTHER; note = 2'-O-methyluridine-3'-phosphate
  modified_base 9: mod_base = OTHER; note = 2'-deoxy-2'-fluorocytidine-3'-phosphate
  modified_base 10: mod_base = OTHER; note = 2'-deoxy-2'-fluoroadenosine-3'-phosphate
  modified_base 11: mod_base = OTHER; note = 2'-deoxy-2'-fluorocytidine-3'-phosphate
  modified_base 12: mod_base = OTHER; note = 2'-O-methyluridine-3'-phosphate
  modified_base 13: mod_base = OTHER; note = 2'-O-methyluridine-3'-phosphate
  modified_base 14: mod_base = OTHER; note = 2'-O-methyluridine-3'-phosphate
  modified_base 15: mod_base = OTHER; note = 2'-O-methyladenosine-3'-phosphate
  modified_base 16: mod_base = OTHER; note = 2'-O-methyladenosine-3'-phosphate
  modified_base 17: mod_base = OTHER; note = 2'-O-methyluridine-3'-phosphate
  modified_base 18: mod_base = OTHER; note = 2'-O-methylcytidine-3'-phosphate
  modified_base 19: mod_base = OTHER; note = 2'-O-methylcytidine-3'-phosphate
  modified_base 20: mod_base = OTHER; note = 2'-O-methyluridine-3'-phosphate
  modified_base 21: mod_base = OTHER; note = 2'-O-methyluridine-3'-phosphate ((2S,4R)-1-[29-[[2-(acetylamino)-2-deoxy-beta-D-galactopyra nosyl]oxy]-14,14-bis[[3-[[3-[[5-[[2-(acetylamino)-2-deoxy-b eta-D-galactopyranosyl]oxy]-1-oxopentyl]amino]propyl]amino] -3-oxopropoxy]methyl]-1,12,19,25-tetraoxo-16-oxa-13,20,24-t riazanonacos-1-yl]-4-hydroxy-2-pyrrolidinyl)methyl ester
caggtcctcactttaatcctt

SEQ ID NO: 1104 - RNA, 21 nt, synthetic construct
  source 1..21: mol_type = other RNA
  modified_base 1: mod_base = OTHER; note = 2'-O-methyladenosine-3'-phosphorothioate
  modified_base 2: mod_base = OTHER; note = 2'-O-methylguanosine-3'-phosphorothioate
  modified_base 3: mod_base = OTHER; note = 2'-O-methylguanosine-3'-phosphate
  modified_base 4: mod_base = OTHER; note = 2'-O-methyluridine-3'-phosphate
  modified_base 5: mod_base = OTHER; note = 2'-O-methylcytidine-3'-phosphate
  modified_base 6: mod_base = OTHER; note = 2'-O-hexadecyl-cytidine-3'-phosphate
  modified_base 7: mod_base = OTHER; note = 2'-deoxy-2'-fluorouridine-3'-phosphate
  modified_base 8: mod_base = OTHER; note = 2'-O-methylcytidine-3'-phosphate
  modified_base 9: mod_base = OTHER; note = 2'-deoxy-2'-fluoroadenosine-3'-phosphate
  modified_base 10: mod_base = OTHER; note = 2'-deoxy-2'-fluorocytidine-3'-phosphate
  modified_base 11: mod_base = OTHER; note = 2'-deoxy-2'-fluorouridine-3'-phosphate
  modified_base 12: mod_base = OTHER; note = 2'-O-methyluridine-3'-phosphate
  modified_base 13: mod_base = OTHER; note = 2'-O-methyluridine-3'-phosphate
  modified_base 14: mod_base = OTHER; note = 2'-O-methyladenosine-3'-phosphate
  modified_base 15: mod_base = OTHER; note = 2'-O-methyladenosine-3'-phosphate
  modified_base 16: mod_base = OTHER; note = 2'-O-methyluridine-3'-phosphate
  modified_base 17: mod_base = OTHER; note = 2'-O-methylcytidine-3'-phosphate
  modified_base 18: mod_base = OTHER; note = 2'-O-methylcytidine-3'-phosphate
  modified_base 19: mod_base = OTHER; note = 2'-O-methyluridine-3'-phosphate
  modified_base 20: mod_base = OTHER; note = 2'-O-methylcytidine-3'-phosphate
  modified_base 21: mod_base = OTHER; note = 2'-O-methyluridine-3'-phosphate ((2S,4R)-1-[29-[[2-(acetylamino)-2-deoxy-beta-D-galactopyra nosyl]oxy]-14,14-bis[[3-[[3-[[5-[[2-(acetylamino)-2-deoxy-b eta-D-galactopyranosyl]oxy]-1-oxopentyl]amino]propyl]amino] -3-oxopropoxy]methyl]-1,12,19,25-tetraoxo-16-oxa-13,20,24-t riazanonacos-1-yl]-4-hydroxy-2-pyrrolidinyl)methyl ester
aggtcctcactttaatcctct

SEQ ID NO: 1105 - RNA, 21 nt, synthetic construct
  source 1..21: mol_type = other RNA
  modified_base 1: mod_base = OTHER; note = 2'-O-methylguanosine-3'-phosphorothioate
  modified_base 2: mod_base = OTHER; note = 2'-O-methylguanosine-3'-phosphorothioate
  modified_base 3: mod_base = OTHER; note = 2'-O-methyluridine-3'-phosphate
  modified_base 4: mod_base = OTHER; note = 2'-O-methylcytidine-3'-phosphate
  modified_base 5: mod_base = OTHER; note = 2'-O-methylcytidine-3'-phosphate
  modified_base 6: mod_base = OTHER; note = 2'-O-hexadecyl-uridine-3'-phosphate
  modified_base 7: mod_base = OTHER; note = 2'-deoxy-2'-fluorocytidine-3'-phosphate
  modified_base 8: mod_base = OTHER; note = 2'-O-methyladenosine-3'-phosphate
  modified_base 9: mod_base = OTHER; note = 2'-deoxy-2'-fluorocytidine-3'-phosphate
  modified_base 10: mod_base = OTHER; note = 2'-deoxy-2'-fluorouridine-3'-phosphate
  modified_base 11: mod_base = OTHER; note = 2'-deoxy-2'-fluorouridine-3'-phosphate
  modified_base 12: mod_base = OTHER; note = 2'-O-methyluridine-3'-phosphate
  modified_base 13: mod_base = OTHER; note = 2'-O-methyladenosine-3'-phosphate
  modified_base 14: mod_base = OTHER; note = 2'-O-methyladenosine-3'-phosphate
  modified_base 15: mod_base = OTHER; note = 2'-O-methyluridine-3'-phosphate
  modified_base 16: mod_base = OTHER; note = 2'-O-methylcytidine-3'-phosphate
  modified_base 17: mod_base = OTHER; note = 2'-O-methylcytidine-3'-phosphate
  modified_base 18: mod_base = OTHER; note = 2'-O-methyluridine-3'-phosphate
  modified_base 19: mod_base = OTHER; note = 2'-O-methylcytidine-3'-phosphate
  modified_base 20: mod_base = OTHER; note = 2'-O-methyluridine-3'-phosphate
  modified_base 21: mod_base = OTHER; note = 2'-O-methyladenosine-3'-phosphate ((2S,4R)-1-[29-[[2-(acetylamino)-2-deoxy-beta-D-galactopyra nosyl]oxy]-14,14-bis[[3-[[3-[[5-[[2-(acetylamino)-2-deoxy-b eta-D-galactopyranosyl]oxy]-1-oxopentyl]amino]propyl]amino] -3-oxopropoxy]methyl]-1,12,19,25-tetraoxo-16-oxa-13,20,24-t riazanonacos-1-yl]-4-hydroxy-2-pyrrolidinyl)methyl ester
ggtcctcactttaatcctcta

SEQ ID NO: 1106 - RNA, 21 nt, synthetic construct
  source 1..21: mol_type = other RNA
  modified_base 1: mod_base = OTHER; note = 2'-O-methylguanosine-3'-phosphorothioate
  modified_base 2: mod_base = OTHER; note = 2'-O-methyluridine-3'-phosphorothioate
  modified_base 3: mod_base = OTHER; note = 2'-O-methylcytidine-3'-phosphate
  modified_base 4: mod_base = OTHER; note = 2'-O-methylcytidine-3'-phosphate
  modified_base 5: mod_base = OTHER; note = 2'-O-methyluridine-3'-phosphate
  modified_base 6: mod_base = OTHER; note = 2'-O-hexadecyl-cytidine-3'-phosphate
  modified_base 7: mod_base = OTHER; note = 2'-deoxy-2'-fluoroadenosine-3'-phosphate
  modified_base 8: mod_base = OTHER; note = 2'-O-methylcytidine-3'-phosphate
  modified_base 9: mod_base = OTHER; note = 2'-deoxy-2'-fluorouridine-3'-phosphate
  modified_base 10: mod_base = OTHER; note = 2'-deoxy-2'-fluorouridine-3'-phosphate
  modified_base 11: mod_base = OTHER; note = 2'-deoxy-2'-fluorouridine-3'-phosphate
  modified_base 12: mod_base = OTHER; note = 2'-O-methyladenosine-3'-phosphate
  modified_base 13: mod_base = OTHER; note = 2'-O-methyladenosine-3'-phosphate
  modified_base 14: mod_base = OTHER; note = 2'-O-methyluridine-3'-phosphate
  modified_base 15: mod_base = OTHER; note = 2'-O-methylcytidine-3'-phosphate
  modified_base 16: mod_base = OTHER; note = 2'-O-methylcytidine-3'-phosphate
  modified_base 17: mod_base = OTHER; note = 2'-O-methyluridine-3'-phosphate
  modified_base 18: mod_base = OTHER; note = 2'-O-methylcytidine-3'-phosphate
  modified_base 19: mod_base = OTHER; note = 2'-O-methyluridine-3'-phosphate
  modified_base 20: mod_base = OTHER; note = 2'-O-methyladenosine-3'-phosphate
  modified_base 21: mod_base = OTHER; note = 2'-O-methyluridine-3'-phosphate ((2S,4R)-1-[29-[[2-(acetylamino)-2-deoxy-beta-D-galactopyra nosyl]oxy]-14,14-bis[[3-[[3-[[5-[[2-(acetylamino)-2-deoxy-b eta-D-galactopyranosyl]oxy]-1-oxopentyl]amino]propyl]amino] -3-oxopropoxy]methyl]-1,12,19,25-tetraoxo-16-oxa-13,20,24-t riazanonacos-1-yl]-4-hydroxy-2-pyrrolidinyl)methyl ester
gtcctcactttaatcctctat

SEQ ID NO: 1107 - RNA, 21 nt, synthetic construct
  source 1..21: mol_type = other RNA
  modified_base 1: mod_base = OTHER; note = 2'-O-methyluridine-3'-phosphorothioate
  modified_base 2: mod_base = OTHER; note = 2'-O-methylcytidine-3'-phosphorothioate
  modified_base 3: mod_base = OTHER; note = 2'-O-methylcytidine-3'-phosphate
  modified_base 4: mod_base = OTHER; note = 2'-O-methyluridine-3'-phosphate
  modified_base 5: mod_base = OTHER; note = 2'-O-methylcytidine-3'-phosphate
  modified_base 6: mod_base = OTHER; note = 2'-O-hexadecyl-adenosine-3'-phosphate
  modified_base 7: mod_base = OTHER; note = 2'-deoxy-2'-fluorocytidine-3'-phosphate
  modified_base 8: mod_base = OTHER; note = 2'-O-methyluridine-3'-phosphate
  modified_base 9: mod_base = OTHER; note = 2'-deoxy-2'-fluorouridine-3'-phosphate
  modified_base 10: mod_base = OTHER; note = 2'-deoxy-2'-fluorouridine-3'-phosphate
  modified_base 11: mod_base = OTHER; note = 2'-deoxy-2'-fluoroadenosine-3'-phosphate
  modified_base 12: mod_base = OTHER; note = 2'-O-methyladenosine-3'-phosphate
  modified_base 13: mod_base = OTHER; note = 2'-O-methyluridine-3'-phosphate
  modified_base 14: mod_base = OTHER; note = 2'-O-methylcytidine-3'-phosphate
  modified_base 15: mod_base = OTHER; note = 2'-O-methylcytidine-3'-phosphate
  modified_base 16: mod_base = OTHER; note = 2'-O-methyluridine-3'-phosphate
  modified_base 17: mod_base = OTHER; note = 2'-O-methylcytidine-3'-phosphate
  modified_base 18: mod_base = OTHER; note = 2'-O-methyluridine-3'-phosphate
  modified_base 19: mod_base = OTHER; note = 2'-O-methyladenosine-3'-phosphate
  modified_base 20: mod_base = OTHER; note = 2'-O-methyluridine-3'-phosphate
  modified_base 21: mod_base = OTHER; note = 2'-O-methyluridine-3'-phosphate ((2S,4R)-1-[29-[[2-(acetylamino)-2-deoxy-beta-D-galactopyra nosyl]oxy]-14,14-bis[[3-[[3-[[5-[[2-(acetylamino)-2-deoxy-b eta-D-galactopyranosyl]oxy]-1-oxopentyl]amino]propyl]amino] -3-oxopropoxy]methyl]-1,12,19,25-tetraoxo-16-oxa-13,20,24-t riazanonacos-1-yl]-4-hydroxy-2-pyrrolidinyl)methyl ester
tcctcactttaatcctctatt

SEQ ID NO: 1108 - RNA, 21 nt, synthetic construct
  source 1..21: mol_type = other RNA
  modified_base 1: mod_base = OTHER; note = 2'-O-methylcytidine-3'-phosphorothioate
  modified_base 2: mod_base = OTHER; note = 2'-O-methylcytidine-3'-phosphorothioate
  modified_base 3: mod_base = OTHER; note = 2'-O-methyluridine-3'-phosphate
  modified_base 4: mod_base = OTHER; note = 2'-O-methylcytidine-3'-phosphate
  modified_base 5: mod_base = OTHER; note = 2'-O-methyladenosine-3'-phosphate
  modified_base 6: mod_base = OTHER; note = 2'-O-hexadecyl-cytidine-3'-phosphate
  modified_base 7: mod_base = OTHER; note = 2'-deoxy-2'-fluorouridine-3'-phosphate
  modified_base 8: mod_base = OTHER; note = 2'-O-methyluridine-3'-phosphate
  modified_base 9: mod_base = OTHER; note = 2'-deoxy-2'-fluorouridine-3'-phosphate
  modified_base 10: mod_base = OTHER; note = 2'-deoxy-2'-fluoroadenosine-3'-phosphate
  modified_base 11: mod_base = OTHER; note = 2'-deoxy-2'-fluoroadenosine-3'-phosphate
  modified_base 12: mod_base = OTHER; note = 2'-O-methyluridine-3'-phosphate
  modified_base 13: mod_base = OTHER; note = 2'-O-methylcytidine-3'-phosphate
  modified_base 14: mod_base = OTHER; note = 2'-O-methylcytidine-3'-phosphate
  modified_base 15: mod_base = OTHER; note = 2'-O-methyluridine-3'-phosphate
  modified_base 16: mod_base = OTHER; note = 2'-O-methylcytidine-3'-phosphate
  modified_base 17: mod_base = OTHER; note = 2'-O-methyluridine-3'-phosphate
  modified_base 18: mod_base = OTHER; note = 2'-O-methyladenosine-3'-phosphate
  modified_base 19: mod_base = OTHER; note = 2'-O-methyluridine-3'-phosphate
  modified_base 20: mod_base = OTHER; note = 2'-O-methylcytidine-3'-phosphate
  modified_base 21: mod_base = OTHER; note = 2'-O-methyluridine-3'-phosphate ((2S,4R)-1-[29-[[2-(acetylamino)-2-deoxy-beta-D-galactopyra nosyl]oxy]-14,14-bis[[3-[[3-[[5-[[2-(acetylamino)-2-deoxy-b eta-D-galactopyranosyl]oxy]-1-oxopentyl]amino]propyl]amino] -3-oxopropoxy]methyl]-1,12,19,25-tetraoxo-16-oxa-13,20,24-t riazanonacos-1-yl]-4-hydroxy-2-pyrrolidinyl)methyl ester
cctcactttaatcctctatct

SEQ ID NO: 1109 - RNA, 21 nt, synthetic construct
  source 1..21: mol_type = other RNA
  modified_base 1: mod_base = OTHER; note = 2'-O-methylcytidine-3'-phosphorothioate
  modified_base 2: mod_base = OTHER; note = 2'-O-methyluridine-3'-phosphorothioate
  modified_base 3: mod_base = OTHER; note = 2'-O-methylcytidine-3'-phosphate
  modified_base 4: mod_base = OTHER; note = 2'-O-methyladenosine-3'-phosphate
  modified_base 5: mod_base = OTHER; note = 2'-O-methylcytidine-3'-phosphate
  modified_base 6: mod_base = OTHER; note = 2'-O-hexadecyl-uridine-3'-phosphate
  modified_base 7: mod_base = OTHER; note = 2'-deoxy-2'-fluorouridine-3'-phosphate
  modified_base 8: mod_base = OTHER; note = 2'-O-methyluridine-3'-phosphate
  modified_base 9: mod_base = OTHER; note = 2'-deoxy-2'-fluoroadenosine-3'-phosphate
  modified_base 10: mod_base = OTHER; note = 2'-deoxy-2'-fluoroadenosine-3'-phosphate
  modified_base 11: mod_base = OTHER; note = 2'-deoxy-2'-fluorouridine-3'-phosphate
  modified_base 12: mod_base = OTHER; note = 2'-O-methylcytidine-3'-phosphate
  modified_base 13: mod_base = OTHER; note = 2'-O-methylcytidine-3'-phosphate
  modified_base 14: mod_base = OTHER; note = 2'-O-methyluridine-3'-phosphate
  modified_base 15: mod_base = OTHER; note = 2'-O-methylcytidine-3'-phosphate
  modified_base 16: mod_base = OTHER; note = 2'-O-methyluridine-3'-phosphate
  modified_base 17: mod_base = OTHER; note = 2'-O-methyladenosine-3'-phosphate
  modified_base 18: mod_base = OTHER; note = 2'-O-methyluridine-3'-phosphate
  modified_base 19: mod_base = OTHER; note = 2'-O-methylcytidine-3'-phosphate
  modified_base 20: mod_base = OTHER; note = 2'-O-methylcytidine-3'-phosphate
  modified_base 21: mod_base = OTHER; note = 2'-O-methyladenosine-3'-phosphate ((2S,4R)-1-[29-[[2-(acetylamino)-2-deoxy-beta-D-galactopyra nosyl]oxy]-14,14-bis[[3-[[3-[[5-[[2-(acetylamino)-2-deoxy-b eta-D-galactopyranosyl]oxy]-1-oxopentyl]amino]propyl]amino] -3-oxopropoxy]methyl]-1,12,19,25-tetraoxo-16-oxa-13,20,24-t riazanonacos-1-yl]-4-hydroxy-2-pyrrolidinyl)methyl ester
ctcactttaatcctctatcca

SEQ ID NO: 1110 - RNA, 21 nt, synthetic construct
  source 1..21: mol_type = other RNA
  modified_base 1: mod_base = OTHER; note = 2'-O-methyluridine-3'-phosphorothioate
  modified_base 2: mod_base = OTHER; note = 2'-O-methylcytidine-3'-phosphorothioate
  modified_base 3: mod_base = OTHER; note = 2'-O-methyladenosine-3'-phosphate
  modified_base 4: mod_base = OTHER; note = 2'-O-methylcytidine-3'-phosphate
  modified_base 5: mod_base = OTHER; note = 2'-O-methyluridine-3'-phosphate
  modified_base 6: mod_base = OTHER; note = 2'-O-hexadecyl-uridine-3'-phosphate
  modified_base 7: mod_base = OTHER; note = 2'-deoxy-2'-fluorouridine-3'-phosphate
  modified_base 8: mod_base = OTHER; note = 2'-O-methyladenosine-3'-phosphate
  modified_base 9: mod_base = OTHER; note = 2'-deoxy-2'-fluoroadenosine-3'-phosphate
  modified_base 10: mod_base = OTHER; note = 2'-deoxy-2'-fluorouridine-3'-phosphate
  modified_base 11: mod_base = OTHER; note = 2'-deoxy-2'-fluorocytidine-3'-phosphate
  modified_base 12: mod_base = OTHER; note = 2'-O-methylcytidine-3'-phosphate
  modified_base 13: mod_base = OTHER; note = 2'-O-methyluridine-3'-phosphate
  modified_base 14: mod_base = OTHER; note = 2'-O-methylcytidine-3'-phosphate
  modified_base 15: mod_base = OTHER; note = 2'-O-methyluridine-3'-phosphate
  modified_base 16: mod_base = OTHER; note = 2'-O-methyladenosine-3'-phosphate
  modified_base 17: mod_base = OTHER; note = 2'-O-methyluridine-3'-phosphate
  modified_base 18: mod_base = OTHER; note = 2'-O-methylcytidine-3'-phosphate
  modified_base 19: mod_base = OTHER; note = 2'-O-methylcytidine-3'-phosphate
  modified_base 20: mod_base = OTHER; note = 2'-O-methyladenosine-3'-phosphate
  modified_base 21: mod_base = OTHER; note = 2'-O-methyluridine-3'-phosphate ((2S,4R)-1-[29-[[2-(acetylamino)-2-deoxy-beta-D-galactopyra nosyl]oxy]-14,14-bis[[3-[[3-[[5-[[2-(acetylamino)-2-deoxy-b eta-D-galactopyranosyl]oxy]-1-oxopentyl]amino]propyl]amino] -3-oxopropoxy]methyl]-1,12,19,25-tetraoxo-16-oxa-13,20,24-t riazanonacos-1-yl]-4-hydroxy-2-pyrrolidinyl)methyl ester
tcactttaatcctctatccat

SEQ ID NO: 1111 - RNA, 21 nt, synthetic construct
  source 1..21: mol_type = other RNA
  modified_base 1: mod_base = OTHER; note = 2'-O-methylcytidine-3'-phosphorothioate
  modified_base 2: mod_base = OTHER; note = 2'-O-methyladenosine-3'-phosphorothioate
  modified_base 3: mod_base = OTHER; note = 2'-O-methylcytidine-3'-phosphate
  modified_base 4: mod_base = OTHER; note = 2'-O-methyluridine-3'-phosphate
  modified_base 5: mod_base = OTHER; note = 2'-O-methyluridine-3'-phosphate
  modified_base 6: mod_base = OTHER; note = 2'-O-hexadecyl-uridine-3'-phosphate
  modified_base 7: mod_base = OTHER; note = 2'-deoxy-2'-fluoroadenosine-3'-phosphate
  modified_base 8: mod_base = OTHER; note = 2'-O-methyladenosine-3'-phosphate
  modified_base 9: mod_base = OTHER; note = 2'-deoxy-2'-fluorouridine-3'-phosphate
  modified_base 10: mod_base = OTHER; note = 2'-deoxy-2'-fluorocytidine-3'-phosphate
  modified_base 11: mod_base = OTHER; note = 2'-deoxy-2'-fluorocytidine-3'-phosphate
  modified_base 12: mod_base = OTHER; note = 2'-O-methyluridine-3'-phosphate
  modified_base 13: mod_base = OTHER; note = 2'-O-methylcytidine-3'-phosphate
  modified_base 14: mod_base = OTHER; note = 2'-O-methyluridine-3'-phosphate
  modified_base 15: mod_base = OTHER; note = 2'-O-methyladenosine-3'-phosphate
  modified_base 16: mod_base = OTHER; note = 2'-O-methyluridine-3'-phosphate
  modified_base 17: mod_base = OTHER; note = 2'-O-methylcytidine-3'-phosphate
  modified_base 18: mod_base = OTHER; note = 2'-O-methylcytidine-3'-phosphate
  modified_base 19: mod_base = OTHER; note = 2'-O-methyladenosine-3'-phosphate
  modified_base 20: mod_base = OTHER; note = 2'-O-methylguanosine-3'-phosphate
  modified_base 21: mod_base = OTHER; note = 2'-O-methyladenosine-3'-phosphate ((2S,4R)-1-[29-[[2-(acetylamino)-2-deoxy-beta-D-galactopyra nosyl]oxy]-14,14-bis[[3-[[3-[[5-[[2-(acetylamino)-2-deoxy-b eta-D-galactopyranosyl]oxy]-1-oxopentyl]amino]propyl]amino] -3-oxopropoxy]methyl]-1,12,19,25-tetraoxo-16-oxa-13,20,24-t riazanonacos-1-yl]-4-hydroxy-2-pyrrolidinyl)methyl ester
cactttaatcctctatccaga

SEQ ID NO: 1112 - RNA, 21 nt, synthetic construct
  source 1..21: mol_type = other RNA
  modified_base 1: mod_base = OTHER; note = 2'-O-methyladenosine-3'-phosphorothioate
  modified_base 2: mod_base = OTHER; note = 2'-O-methylcytidine-3'-phosphorothioate
  modified_base 3: mod_base = OTHER; note = 2'-O-methyluridine-3'-phosphate
  modified_base 4: mod_base = OTHER; note = 2'-O-methyluridine-3'-phosphate
  modified_base 5: mod_base = OTHER; note = 2'-O-methyluridine-3'-phosphate
  modified_base 6: mod_base = OTHER; note = 2'-O-hexadecyl-adenosine-3'-phosphate
  modified_base 7: mod_base = OTHER; note = 2'-deoxy-2'-fluoroadenosine-3'-phosphate
  modified_base 8: mod_base = OTHER; note = 2'-O-methyluridine-3'-phosphate
  modified_base 9: mod_base = OTHER; note = 2'-deoxy-2'-fluorocytidine-3'-phosphate
  modified_base 10: mod_base = OTHER; note = 2'-deoxy-2'-fluorocytidine-3'-phosphate
  modified_base 11: mod_base = OTHER; note = 2'-deoxy-2'-fluorouridine-3'-phosphate
  modified_base 12: mod_base = OTHER; note = 2'-O-methylcytidine-3'-phosphate
  modified_base 13: mod_base = OTHER; note = 2'-O-methyluridine-3'-phosphate
  modified_base 14: mod_base = OTHER; note = 2'-O-methyladenosine-3'-phosphate
  modified_base 15: mod_base = OTHER; note = 2'-O-methyluridine-3'-phosphate
  modified_base 16: mod_base = OTHER; note = 2'-O-methylcytidine-3'-phosphate
  modified_base 17: mod_base = OTHER; note = 2'-O-methylcytidine-3'-phosphate
  modified_base 18: mod_base = OTHER; note = 2'-O-methyladenosine-3'-phosphate
  modified_base 19: mod_base = OTHER; note = 2'-O-methylguanosine-3'-phosphate
  modified_base 20: mod_base = OTHER; note = 2'-O-methyladenosine-3'-phosphate
  modified_base 21: mod_base = OTHER; note = 2'-O-methyladenosine-3'-phosphate ((2S,4R)-1-[29-[[2-(acetylamino)-2-deoxy-beta-D-galactopyra nosyl]oxy]-14,14-bis[[3-[[3-[[5-[[2-(acetylamino)-2-deoxy-b eta-D-galactopyranosyl]oxy]-1-oxopentyl]amino]propyl]amino] -3-oxopropoxy]methyl]-1,12,19,25-tetraoxo-16-oxa-13,20,24-t riazanonacos-1-yl]-4-hydroxy-2-pyrrolidinyl)methyl ester
actttaatcctctatccagaa

SEQ ID NO: 1113 - RNA, 21 nt, synthetic construct
  source 1..21: mol_type = other RNA
  modified_base 1: mod_base = OTHER; note = 2'-O-methylguanosine-3'-phosphorothioate
  modified_base 2: mod_base = OTHER; note = 2'-O-methyluridine-3'-phosphorothioate
  modified_base 3: mod_base = OTHER; note = 2'-O-methylguanosine-3'-phosphate
  modified_base 4: mod_base = OTHER; note = 2'-O-methylguanosine-3'-phosphate
  modified_base 5: mod_base = OTHER; note = 2'-O-methylguanosine-3'-phosphate
  modified_base 6: mod_base = OTHER; note = 2'-O-hexadecyl-cytidine-3'-phosphate
  modified_base 7: mod_base = OTHER; note = 2'-deoxy-2'-fluorocytidine-3'-phosphate
  modified_base 8: mod_base = OTHER; note = 2'-O-methyladenosine-3'-phosphate
  modified_base 9: mod_base = OTHER; note = 2'-deoxy-2'-fluoroadenosine-3'-phosphate
  modified_base 10: mod_base = OTHER; note = 2'-deoxy-2'-fluoroadenosine-3'-phosphate
  modified_base 11: mod_base = OTHER; note = 2'-deoxy-2'-fluoroguanosine-3'-phosphate
  modified_base 12: mod_base = OTHER; note = 2'-O-methylguanosine-3'-phosphate
  modified_base 13: mod_base = OTHER; note = 2'-O-methyladenosine-3'-phosphate
  modified_base 14: mod_base = OTHER; note = 2'-O-methyluridine-3'-phosphate
  modified_base 15: mod_base = OTHER; note = 2'-O-methylguanosine-3'-phosphate
  modified_base 16: mod_base = OTHER; note = 2'-O-methyladenosine-3'-phosphate
  modified_base 17: mod_base = OTHER; note = 2'-O-methyladenosine-3'-phosphate
  modified_base 18: mod_base = OTHER; note = 2'-O-methylguanosine-3'-phosphate
  modified_base 19: mod_base = OTHER; note = 2'-O-methyladenosine-3'-phosphate
  modified_base 20: mod_base = OTHER; note = 2'-O-methylguanosine-3'-phosphate
  modified_base 21: mod_base = OTHER; note = 2'-O-methyladenosine-3'-phosphate ((2S,4R)-1-[29-[[2-(acetylamino)-2-deoxy-beta-D-galactopyra nosyl]oxy]-14,14-bis[[3-[[3-[[5-[[2-(acetylamino)-2-deoxy-b eta-D-galactopyranosyl]oxy]-1-oxopentyl]amino]propyl]amino] -3-oxopropoxy]methyl]-1,12,19,25-tetraoxo-16-oxa-13,20,24-t riazanonacos-1-yl]-4-hydroxy-2-pyrrolidinyl)methyl ester
gtgggccaaaggatgaagaga

SEQ ID NO: 1114 - RNA, 21 nt, synthetic construct
  source 1..21: mol_type = other RNA
  modified_base 1: mod_base = OTHER; note = 2'-O-methyluridine-3'-phosphorothioate
  modified_base 2: mod_base = OTHER; note = 2'-O-methylguanosine-3'-phosphorothioate
  modified_base 3: mod_base = OTHER; note = 2'-O-methylguanosine-3'-phosphate
  modified_base 4: mod_base = OTHER; note = 2'-O-methylguanosine-3'-phosphate
  modified_base 5: mod_base = OTHER; note = 2'-O-methylcytidine-3'-phosphate
  modified_base 6: mod_base = OTHER; note = 2'-O-hexadecyl-cytidine-3'-phosphate
  modified_base 7: mod_base = OTHER; note = 2'-deoxy-2'-fluoroadenosine-3'-phosphate
  modified_base 8: mod_base = OTHER; note = 2'-O-methyladenosine-3'-phosphate
  modified_base 9: mod_base = OTHER; note = 2'-deoxy-2'-fluoroadenosine-3'-phosphate
  modified_base 10: mod_base = OTHER; note = 2'-deoxy-2'-fluoroguanosine-3'-phosphate
  modified_base 11: mod_base = OTHER; note = 2'-deoxy-2'-fluoroguanosine-3'-phosphate
  modified_base 12: mod_base = OTHER; note = 2'-O-methyladenosine-3'-phosphate
  modified_base 13: mod_base = OTHER; note = 2'-O-methyluridine-3'-phosphate
  modified_base 14: mod_base = OTHER; note = 2'-O-methylguanosine-3'-phosphate
  modified_base 15: mod_base = OTHER; note = 2'-O-methyladenosine-3'-phosphate
  modified_base 16: mod_base = OTHER; note = 2'-O-methyladenosine-3'-phosphate
  modified_base 17: mod_base = OTHER; note = 2'-O-methylguanosine-3'-phosphate
  modified_base 18: mod_base = OTHER; note = 2'-O-methyladenosine-3'-phosphate
  modified_base 19: mod_base = OTHER; note = 2'-O-methylguanosine-3'-phosphate
  modified_base 20: mod_base = OTHER; note = 2'-O-methyladenosine-3'-phosphate
  modified_base 21: mod_base = OTHER; note = 2'-O-methyluridine-3'-phosphate ((2S,4R)-1-[29-[[2-(acetylamino)-2-deoxy-beta-D-galactopyra nosyl]oxy]-14,14-bis[[3-[[3-[[5-[[2-(acetylamino)-2-deoxy-b eta-D-galactopyranosyl]oxy]-1-oxopentyl]amino]propyl]amino] -3-oxopropoxy]methyl]-1,12,19,25-tetraoxo-16-oxa-13,20,24-t riazanonacos-1-yl]-4-hydroxy-2-pyrrolidinyl)methyl ester
tgggccaaaggatgaagagat

SEQ ID NO: 1115 - RNA, 21 nt, synthetic construct
  source 1..21: mol_type = other RNA
  modified_base 1: mod_base = OTHER; note = 2'-O-methylguanosine-3'-phosphorothioate
  modified_base 2: mod_base = OTHER; note = 2'-O-methylguanosine-3'-phosphorothioate
  modified_base 3: mod_base = OTHER; note = 2'-O-methylguanosine-3'-phosphate
  modified_base 4: mod_base = OTHER; note = 2'-O-methylcytidine-3'-phosphate
  modified_base 5: mod_base = OTHER; note = 2'-O-methylcytidine-3'-phosphate
  modified_base 6: mod_base = OTHER; note = 2'-O-hexadecyl-adenosine-3'-phosphate
  modified_base 7: mod_base = OTHER; note = 2'-deoxy-2'-fluoroadenosine-3'-phosphate
  modified_base 8: mod_base = OTHER; note = 2'-O-methyladenosine-3'-phosphate
  modified_base 9: mod_base = OTHER; note = 2'-deoxy-2'-fluoroguanosine-3'-phosphate
  modified_base 10: mod_base = OTHER; note = 2'-deoxy-2'-fluoroguanosine-3'-phosphate
  modified_base 11: mod_base = OTHER; note = 2'-deoxy-2'-fluoroadenosine-3'-phosphate
  modified_base 12: mod_base = OTHER; note = 2'-O-methyluridine-3'-phosphate
  modified_base 13: mod_base = OTHER; note = 2'-O-methylguanosine-3'-phosphate
  modified_base 14: mod_base = OTHER; note = 2'-O-methyladenosine-3'-phosphate
  modified_base 15: mod_base = OTHER; note = 2'-O-methyladenosine-3'-phosphate
  modified_base 16: mod_base = OTHER; note = 2'-O-methylguanosine-3'-phosphate
  modified_base 17: mod_base = OTHER; note = 2'-O-methyladenosine-3'-phosphate
  modified_base 18: mod_base = OTHER; note = 2'-O-methylguanosine-3'-phosphate
  modified_base 19: mod_base = OTHER; note = 2'-O-methyladenosine-3'-phosphate
  modified_base 20: mod_base = OTHER; note = 2'-O-methylguanosine-3'-phosphate
  modified_base 21: mod_base = OTHER; note = 2'-O-methyluridine-3'-phosphate ((2S,4R)-1-[29-[[2-(acetylamino)-2-deoxy-beta-D-galactopyra nosyl]oxy]-14,14-bis[[3-[[3-[[5-[[2-(acetylamino)-2-deoxy-b eta-D-galactopyranosyl]oxy]-1-oxopentyl]amino]propyl]amino] -3-oxopropoxy]methyl]-1,12,19,25-tetraoxo-16-oxa-13,20,24-t riazanonacos-1-yl]-4-hydroxy-2-pyrrolidinyl)methyl ester
gggccaaaggatgaagagagt

SEQ ID NO: 1116 - RNA, 21 nt, synthetic construct
  source 1..21: mol_type = other RNA
  modified_base 1: mod_base = OTHER; note = 2'-O-methylguanosine-3'-phosphorothioate
  modified_base 2: mod_base = OTHER; note = 2'-O-methylguanosine-3'-phosphorothioate
  modified_base 3: mod_base = OTHER; note = 2'-O-methylcytidine-3'-phosphate
  modified_base 4: mod_base = OTHER; note = 2'-O-methylcytidine-3'-phosphate
  modified_base 5: mod_base = OTHER; note = 2'-O-methyladenosine-3'-phosphate
  modified_base 6: mod_base = OTHER; note = 2'-O-hexadecyl-adenosine-3'-phosphate
  modified_base 7: mod_base = OTHER; note = 2'-deoxy-2'-fluoroadenosine-3'-phosphate
  modified_base 8: mod_base = OTHER; note = 2'-O-methylguanosine-3'-phosphate
  modified_base 9: mod_base = OTHER; note = 2'-deoxy-2'-fluoroguanosine-3'-phosphate
  modified_base 10: mod_base = OTHER; note = 2'-deoxy-2'-fluoroadenosine-3'-phosphate
  modified_base 11: mod_base = OTHER; note = 2'-deoxy-2'-fluorouridine-3'-phosphate
  modified_base 12: mod_base = OTHER; note = 2'-O-methylguanosine-3'-phosphate
  modified_base 13: mod_base = OTHER; note = 2'-O-methyladenosine-3'-phosphate
  modified_base 14: mod_base = OTHER; note = 2'-O-methyladenosine-3'-phosphate
  modified_base 15: mod_base = OTHER; note = 2'-O-methylguanosine-3'-phosphate
  modified_base 16: mod_base = OTHER; note = 2'-O-methyladenosine-3'-phosphate
  modified_base 17: mod_base = OTHER; note = 2'-O-methylguanosine-3'-phosphate
  modified_base 18: mod_base = OTHER; note = 2'-O-methyladenosine-3'-phosphate
  modified_base 19: mod_base = OTHER; note = 2'-O-methylguanosine-3'-phosphate
  modified_base 20: mod_base = OTHER; note = 2'-O-methylguanosine-3'-phosphate
  modified_base 21: mod_base = OTHER; note = 2'-O-methyluridine-3'-phosphate ((2S,4R)-1-[29-[[2-(acetylamino)-2-deoxy-beta-D-galactopyra nosyl]oxy]-14,14-bis[[3-[[3-[[5-[[2-(acetylamino)-2-deoxy-b eta-D-galactopyranosyl]oxy]-1-oxopentyl]amino]propyl]amino] -3-oxopropoxy]methyl]-1,12,19,25-tetraoxo-16-oxa-13,20,24-t riazanonacos-1-yl]-4-hydroxy-2-pyrrolidinyl)methyl ester
ggccaaaggatgaagagaggt

SEQ ID NO: 1117 - RNA, 21 nt, synthetic construct
  source 1..21: mol_type = other RNA
  modified_base 1: mod_base = OTHER; note = 2'-O-methylguanosine-3'-phosphorothioate
  modified_base 2: mod_base = OTHER; note = 2'-O-methylcytidine-3'-phosphorothioate
  modified_base 3: mod_base = OTHER; note = 2'-O-methylcytidine-3'-phosphate
  modified_base 4: mod_base = OTHER; note = 2'-O-methyladenosine-3'-phosphate
  modified_base 5: mod_base = OTHER; note = 2'-O-methyladenosine-3'-phosphate
  modified_base 6: mod_base = OTHER; note = 2'-O-hexadecyl-adenosine-3'-phosphate
  modified_base 7: mod_base = OTHER; note = 2'-deoxy-2'-fluoroguanosine-3'-phosphate
  modified_base 8: mod_base = OTHER; note = 2'-O-methylguanosine-3'-phosphate
  modified_base 9: mod_base = OTHER; note = 2'-deoxy-2'-fluoroadenosine-3'-phosphate
  modified_base 10: mod_base = OTHER; note = 2'-deoxy-2'-fluorouridine-3'-phosphate
  modified_base 11: mod_base = OTHER; note = 2'-deoxy-2'-fluoroguanosine-3'-phosphate
  modified_base 12: mod_base = OTHER; note = 2'-O-methyladenosine-3'-phosphate
  modified_base 13: mod_base = OTHER; note = 2'-O-methyladenosine-3'-phosphate
  modified_base 14: mod_base = OTHER; note = 2'-O-methylguanosine-3'-phosphate
  modified_base 15: mod_base = OTHER; note = 2'-O-methyladenosine-3'-phosphate
  modified_base 16: mod_base = OTHER; note = 2'-O-methylguanosine-3'-phosphate
  modified_base 17: mod_base = OTHER; note = 2'-O-methyladenosine-3'-phosphate
  modified_base 18: mod_base = OTHER; note = 2'-O-methylguanosine-3'-phosphate
  modified_base 19: mod_base = OTHER; note = 2'-O-methylguanosine-3'-phosphate
  modified_base 20: mod_base = OTHER; note = 2'-O-methylcytidine-3'-phosphate
  modified_base 21: mod_base = OTHER; note = 2'-O-methyladenosine-3'-phosphate ((2S,4R)-1-[29-[[2-(acetylamino)-2-deoxy-beta-D-galactopyra nosyl]oxy]-14,14-bis[[3-[[3-[[5-[[2-(acetylamino)-2-deoxy-b eta-D-galactopyranosyl]oxy]-1-oxopentyl]amino]propyl]amino] -3-oxopropoxy]methyl]-1,12,19,25-tetraoxo-16-oxa-13,20,24-t riazanonacos-1-yl]-4-hydroxy-2-pyrrolidinyl)methyl ester
gccaaaggatgaagagaggca

SEQ ID NO: 1118 - RNA, 21 nt, synthetic construct
  source 1..21: mol_type = other RNA
  modified_base 1: mod_base = OTHER; note = 2'-O-methylcytidine-3'-phosphorothioate
  modified_base 2: mod_base = OTHER; note = 2'-O-methylcytidine-3'-phosphorothioate
  modified_base 3: mod_base = OTHER; note = 2'-O-methyladenosine-3'-phosphate
  modified_base 4: mod_base = OTHER; note = 2'-O-methyladenosine-3'-phosphate
  modified_base 5: mod_base = OTHER; note = 2'-O-methyladenosine-3'-phosphate
  modified_base 6: mod_base = OTHER; note = 2'-O-hexadecyl-guanosine-3'-phosphate
  modified_base 7: mod_base = OTHER; note = 2'-deoxy-2'-fluoroguanosine-3'-phosphate
  modified_base 8: mod_base = OTHER; note = 2'-O-methyladenosine-3'-phosphate
  modified_base 9: mod_base = OTHER; note = 2'-deoxy-2'-fluorouridine-3'-phosphate
  modified_base 10: mod_base = OTHER; note = 2'-deoxy-2'-fluoroguanosine-3'-phosphate
  modified_base 11: mod_base = OTHER; note = 2'-deoxy-2'-fluoroadenosine-3'-phosphate
  modified_base 12: mod_base = OTHER; note = 2'-O-methyladenosine-3'-phosphate
  modified_base 13: mod_base = OTHER; note = 2'-O-methylguanosine-3'-phosphate
  modified_base 14: mod_base = OTHER; note = 2'-O-methyladenosine-3'-phosphate
  modified_base 15: mod_base = OTHER; note = 2'-O-methylguanosine-3'-phosphate
  modified_base 16: mod_base = OTHER; note = 2'-O-methyladenosine-3'-phosphate
  modified_base 17: mod_base = OTHER; note = 2'-O-methylguanosine-3'-phosphate
  modified_base 18: mod_base = OTHER; note = 2'-O-methylguanosine-3'-phosphate
  modified_base 19: mod_base = OTHER; note = 2'-O-methylcytidine-3'-phosphate
  modified_base 20: mod_base = OTHER; note = 2'-O-methyladenosine-3'-phosphate
  modified_base 21: mod_base = OTHER; note = 2'-O-methyluridine-3'-phosphate ((2S,4R)-1-[29-[[2-(acetylamino)-2-deoxy-beta-D-galactopyra nosyl]oxy]-14,14-bis[[3-[[3-[[5-[[2-(acetylamino)-2-deoxy-b eta-D-galactopyranosyl]oxy]-1-oxopentyl]amino]propyl]amino] -3-oxopropoxy]methyl]-1,12,19,25-tetraoxo-16-oxa-13,20,24-t riazanonacos-1-yl]-4-hydroxy-2-pyrrolidinyl)methyl ester
ccaaaggatgaagagaggcat

SEQ ID NO: 1119 - RNA, 21 nt, synthetic construct
  source 1..21: mol_type = other RNA
  modified_base 1: mod_base = OTHER; note = 2'-O-methylcytidine-3'-phosphorothioate
  modified_base 2: mod_base = OTHER; note = 2'-O-methyladenosine-3'-phosphorothioate
  modified_base 3: mod_base = OTHER; note = 2'-O-methyladenosine-3'-phosphate
  modified_base 4: mod_base = OTHER; note = 2'-O-methyladenosine-3'-phosphate
  modified_base 5: mod_base = OTHER; note = 2'-O-methylguanosine-3'-phosphate
  modified_base 6: mod_base = OTHER; note = 2'-O-hexadecyl-guanosine-3'-phosphate
  modified_base 7: mod_base = OTHER; note = 2'-deoxy-2'-fluoroadenosine-3'-phosphate
  modified_base 8: mod_base = OTHER; note = 2'-O-methyluridine-3'-phosphate
  modified_base 9: mod_base = OTHER; note = 2'-deoxy-2'-fluoroguanosine-3'-phosphate
  modified_base 10: mod_base = OTHER; note = 2'-deoxy-2'-fluoroadenosine-3'-phosphate
  modified_base 11: mod_base = OTHER; note = 2'-deoxy-2'-fluoroadenosine-3'-phosphate
  modified_base 12: mod_base = OTHER; note = 2'-O-methylguanosine-3'-phosphate
  modified_base 13: mod_base = OTHER; note = 2'-O-methyladenosine-3'-phosphate
  modified_base 14: mod_base = OTHER; note = 2'-O-methylguanosine-3'-phosphate
  modified_base 15: mod_base = OTHER; note = 2'-O-methyladenosine-3'-phosphate
  modified_base 16: mod_base = OTHER; note = 2'-O-methylguanosine-3'-phosphate
  modified_base 17: mod_base = OTHER; note = 2'-O-methylguanosine-3'-phosphate
  modified_base 18: mod_base = OTHER; note = 2'-O-methylcytidine-3'-phosphate
  modified_base 19: mod_base = OTHER; note = 2'-O-methyladenosine-3'-phosphate
  modified_base 20: mod_base = OTHER; note = 2'-O-methyluridine-3'-phosphate
  modified_base 21: mod_base = OTHER; note = 2'-O-methyluridine-3'-phosphate ((2S,4R)-1-[29-[[2-(acetylamino)-2-deoxy-beta-D-galactopyra nosyl]oxy]-14,14-bis[[3-[[3-[[5-[[2-(acetylamino)-2-deoxy-b eta-D-galactopyranosyl]oxy]-1-oxopentyl]amino]propyl]amino] -3-oxopropoxy]methyl]-1,12,19,25-tetraoxo-16-oxa-13,20,24-t riazanonacos-1-yl]-4-hydroxy-2-pyrrolidinyl)methyl ester
caaaggatgaagagaggcatt

SEQ ID NO: 1120 - RNA, 21 nt, synthetic construct
  source 1..21: mol_type = other RNA
  modified_base 1: mod_base = OTHER; note = 2'-O-methyladenosine-3'-phosphorothioate
  modified_base 2: mod_base = OTHER; note = 2'-O-methyladenosine-3'-phosphorothioate
  modified_base 3: mod_base = OTHER; note = 2'-O-methyladenosine-3'-phosphate
  modified_base 4: mod_base = OTHER; note = 2'-O-methylguanosine-3'-phosphate
  modified_base 5: mod_base = OTHER; note = 2'-O-methylguanosine-3'-phosphate
  modified_base 6: mod_base = OTHER; note = 2'-O-hexadecyl-adenosine-3'-phosphate
  modified_base 7: mod_base = OTHER; note = 2'-deoxy-2'-fluorouridine-3'-phosphate
  modified_base 8: mod_base = OTHER; note = 2'-O-methylguanosine-3'-phosphate
  modified_base 9: mod_base = OTHER; note = 2'-deoxy-2'-fluoroadenosine-3'-phosphate
  modified_base 10: mod_base = OTHER; note = 2'-deoxy-2'-fluoroadenosine-3'-phosphate
  modified_base 11: mod_base = OTHER; note = 2'-deoxy-2'-fluoroguanosine-3'-phosphate
  modified_base 12: mod_base = OTHER; note = 2'-O-methyladenosine-3'-phosphate
  modified_base 13: mod_base = OTHER; note = 2'-O-methylguanosine-3'-phosphate
  modified_base 14: mod_base = OTHER; note = 2'-O-methyladenosine-3'-phosphate
  modified_base 15: mod_base = OTHER; note = 2'-O-methylguanosine-3'-phosphate
  modified_base 16: mod_base = OTHER; note = 2'-O-methylguanosine-3'-phosphate
  modified_base 17: mod_base = OTHER; note = 2'-O-methylcytidine-3'-phosphate
  modified_base 18: mod_base = OTHER; note = 2'-O-methyladenosine-3'-phosphate
  modified_base 19: mod_base = OTHER; note = 2'-O-methyluridine-3'-phosphate
  modified_base 20: mod_base = OTHER; note = 2'-O-methylguanosine-3'-phosphate
  modified_base 21: mod_base = OTHER; note = 2'-O-methyluridine-3'-phosphate ((2S,4R)-1-[29-[[2-(acetylamino)-2-deoxy-beta-D-galactopyra nosyl]oxy]-14,14-bis[[3-[[3-[[5-[[2-(acetylamino)-2-deoxy-b eta-D-galactopyranosyl]oxy]-1-oxopentyl]amino]propyl]amino] -3-oxopropoxy]methyl]-1,12,19,25-tetraoxo-16-oxa-13,20,24-t riazanonacos-1-yl]-4-hydroxy-2-pyrrolidinyl)methyl ester
aaaggatgaagagaggcatgt

SEQ ID NO: 1121 - RNA, 21 nt, synthetic construct
  source 1..21: mol_type = other RNA
  modified_base 1: mod_base = OTHER; note = 2'-O-methyladenosine-3'-phosphorothioate
  modified_base 2: mod_base = OTHER; note = 2'-O-methyladenosine-3'-phosphorothioate
  modified_base 3: mod_base = OTHER; note = 2'-O-methylguanosine-3'-phosphate
  modified_base 4: mod_base = OTHER; note = 2'-O-methylguanosine-3'-phosphate
  modified_base 5: mod_base = OTHER; note = 2'-O-methyladenosine-3'-phosphate
  modified_base 6: mod_base = OTHER; note = 2'-O-hexadecyl-uridine-3'-phosphate
  modified_base 7: mod_base = OTHER; note = 2'-deoxy-2'-fluoroguanosine-3'-phosphate
  modified_base 8: mod_base = OTHER; note = 2'-O-methyladenosine-3'-phosphate
  modified_base 9: mod_base = OTHER; note = 2'-deoxy-2'-fluoroadenosine-3'-phosphate
  modified_base 10: mod_base = OTHER; note = 2'-deoxy-2'-fluoroguanosine-3'-phosphate
  modified_base 11: mod_base = OTHER; note = 2'-deoxy-2'-fluoroadenosine-3'-phosphate
  modified_base 12: mod_base = OTHER; note = 2'-O-methylguanosine-3'-phosphate
  modified_base 13: mod_base = OTHER; note = 2'-O-methyladenosine-3'-phosphate
  modified_base 14: mod_base = OTHER; note = 2'-O-methylguanosine-3'-phosphate
  modified_base 15: mod_base = OTHER; note = 2'-O-methylguanosine-3'-phosphate
  modified_base 16: mod_base = OTHER; note = 2'-O-methylcytidine-3'-phosphate
  modified_base 17: mod_base = OTHER; note = 2'-O-methyladenosine-3'-phosphate
  modified_base 18: mod_base = OTHER; note = 2'-O-methyluridine-3'-phosphate
  modified_base 19: mod_base = OTHER; note = 2'-O-methylguanosine-3'-phosphate
  modified_base 20: mod_base = OTHER; note = 2'-O-methyluridine-3'-phosphate
  modified_base 21: mod_base = OTHER; note = 2'-O-methyluridine-3'-phosphate ((2S,4R)-1-[29-[[2-(acetylamino)-2-deoxy-beta-D-galactopyra nosyl]oxy]-14,14-bis[[3-[[3-[[5-[[2-(acetylamino)-2-deoxy-b eta-D-galactopyranosyl]oxy]-1-oxopentyl]amino]propyl]amino] -3-oxopropoxy]methyl]-1,12,19,25-tetraoxo-16-oxa-13,20,24-t riazanonacos-1-yl]-4-hydroxy-2-pyrrolidinyl)methyl ester
aaggatgaagagaggcatgtt

SEQ ID NO: 1122 - RNA, 21 nt, synthetic construct
  source 1..21: mol_type = other RNA
  modified_base 1: mod_base = OTHER; note = 2'-O-methyladenosine-3'-phosphorothioate
  modified_base 2: mod_base = OTHER; note = 2'-O-methylguanosine-3'-phosphorothioate
  modified_base 3: mod_base = OTHER; note = 2'-O-methylguanosine-3'-phosphate
  modified_base 4: mod_base = OTHER; note = 2'-O-methyladenosine-3'-phosphate
  modified_base 5: mod_base = OTHER; note = 2'-O-methyluridine-3'-phosphate
  modified_base 6: mod_base = OTHER; note = 2'-O-hexadecyl-guanosine-3'-phosphate
  modified_base 7: mod_base = OTHER; note = 2'-deoxy-2'-fluoroadenosine-3'-phosphate
  modified_base 8: mod_base = OTHER; note = 2'-O-methyladenosine-3'-phosphate
  modified_base 9: mod_base = OTHER; note = 2'-deoxy-2'-fluoroguanosine-3'-phosphate
  modified_base 10: mod_base = OTHER; note = 2'-deoxy-2'-fluoroadenosine-3'-phosphate
  modified_base 11: mod_base = OTHER; note = 2'-deoxy-2'-fluoroguanosine-3'-phosphate
  modified_base 12: mod_base = OTHER; note = 2'-O-methyladenosine-3'-phosphate
  modified_base 13: mod_base = OTHER; note = 2'-O-methylguanosine-3'-phosphate
  modified_base 14: mod_base = OTHER; note = 2'-O-methylguanosine-3'-phosphate
  modified_base 15: mod_base = OTHER; note = 2'-O-methylcytidine-3'-phosphate
  modified_base 16: mod_base = OTHER; note = 2'-O-methyladenosine-3'-phosphate
  modified_base 17: mod_base = OTHER; note = 2'-O-methyluridine-3'-phosphate
  modified_base 18: mod_base = OTHER; note = 2'-O-methylguanosine-3'-phosphate
  modified_base 19: mod_base = OTHER; note = 2'-O-methyluridine-3'-phosphate
  modified_base 20: mod_base = OTHER; note = 2'-O-methyluridine-3'-phosphate
  modified_base 21: mod_base = OTHER; note = 2'-O-methyluridine-3'-phosphate ((2S,4R)-1-[29-[[2-(acetylamino)-2-deoxy-beta-D-galactopyra nosyl]oxy]-14,14-bis[[3-[[3-[[5-[[2-(acetylamino)-2-deoxy-b eta-D-galactopyranosyl]oxy]-1-oxopentyl]amino]propyl]amino] -3-oxopropoxy]methyl]-1,12,19,25-tetraoxo-16-oxa-13,20,24-t riazanonacos-1-yl]-4-hydroxy-2-pyrrolidinyl)methyl ester
aggatgaagagaggcatgttt

SEQ ID NO: 1123 - RNA, 21 nt, synthetic construct
  source 1..21: mol_type = other RNA
  modified_base 1: mod_base = OTHER; note = 2'-O-methylguanosine-3'-phosphorothioate
  modified_base 2: mod_base = OTHER; note = 2'-O-methylguanosine-3'-phosphorothioate
  modified_base 3: mod_base = OTHER; note = 2'-O-methyladenosine-3'-phosphate
  modified_base 4: mod_base = OTHER; note = 2'-O-methyluridine-3'-phosphate
  modified_base 5: mod_base = OTHER; note = 2'-O-methylguanosine-3'-phosphate
  modified_base 6: mod_base = OTHER; note = 2'-O-hexadecyl-adenosine-3'-phosphate
  modified_base 7: mod_base = OTHER; note = 2'-deoxy-2'-fluoroadenosine-3'-phosphate
  modified_base 8: mod_base = OTHER; note = 2'-O-methylguanosine-3'-phosphate
  modified_base 9: mod_base = OTHER; note = 2'-deoxy-2'-fluoroadenosine-3'-phosphate
  modified_base 10: mod_base = OTHER; note = 2'-deoxy-2'-fluoroguanosine-3'-phosphate
  modified_base 11: mod_base = OTHER; note = 2'-deoxy-2'-fluoroadenosine-3'-phosphate
  modified_base 12: mod_base = OTHER; note = 2'-O-methylguanosine-3'-phosphate
  modified_base 13: mod_base = OTHER; note = 2'-O-methylguanosine-3'-phosphate
  modified_base 14: mod_base = OTHER; note = 2'-O-methylcytidine-3'-phosphate
  modified_base 15: mod_base = OTHER; note = 2'-O-methyladenosine-3'-phosphate
  modified_base 16: mod_base = OTHER; note = 2'-O-methyluridine-3'-phosphate
  modified_base 17: mod_base = OTHER; note = 2'-O-methylguanosine-3'-phosphate
  modified_base 18: mod_base = OTHER; note = 2'-O-methyluridine-3'-phosphate
  modified_base 19: mod_base = OTHER; note = 2'-O-methyluridine-3'-phosphate
  modified_base 20: mod_base = OTHER; note = 2'-O-methylguanosine-3'-phosphate
  modified_base 21: mod_base = OTHER; note = 2'-O-methyluridine-3'-phosphate ((2S,4R)-1-[29-[[2-(acetylamino)-2-deoxy-beta-D-galactopyra nosyl]oxy]-14,14-bis[[3-[[3-[[5-[[2-(acetylamino)-2-deoxy-b eta-D-galactopyranosyl]oxy]-1-oxopentyl]amino]propyl]amino] -3-oxopropoxy]methyl]-1,12,19,25-tetraoxo-16-oxa-13,20,24-t riazanonacos-1-yl]-4-hydroxy-2-pyrrolidinyl)methyl ester
ggatgaagagaggcatgttgt

SEQ ID NO: 1124 - RNA, 21 nt, synthetic construct
  source 1..21: mol_type = other RNA
  modified_base 1: mod_base = OTHER; note = 2'-O-methylguanosine-3'-phosphorothioate
  modified_base 2: mod_base = OTHER; note = 2'-O-methyladenosine-3'-phosphorothioate
  modified_base 3: mod_base = OTHER; note = 2'-O-methyluridine-3'-phosphate
  modified_base 4: mod_base = OTHER; note = 2'-O-methylguanosine-3'-phosphate
  modified_base 5: mod_base = OTHER; note = 2'-O-methyladenosine-3'-phosphate
  modified_base 6: mod_base = OTHER; note = 2'-O-hexadecyl-adenosine-3'-phosphate
  modified_base 7: mod_base = OTHER; note = 2'-deoxy-2'-fluoroguanosine-3'-phosphate
  modified_base 8: mod_base = OTHER; note = 2'-O-methyladenosine-3'-phosphate
  modified_base 9: mod_base = OTHER; note = 2'-deoxy-2'-fluoroguanosine-3'-phosphate
  modified_base 10: mod_base = OTHER; note = 2'-deoxy-2'-fluoroadenosine-3'-phosphate
  modified_base 11: mod_base = OTHER; note = 2'-deoxy-2'-fluoroguanosine-3'-phosphate
  modified_base 12: mod_base = OTHER; note = 2'-O-methylguanosine-3'-phosphate
  modified_base 13: mod_base = OTHER; note = 2'-O-methylcytidine-3'-phosphate
  modified_base 14: mod_base = OTHER; note = 2'-O-methyladenosine-3'-phosphate
  modified_base 15: mod_base = OTHER; note = 2'-O-methyluridine-3'-phosphate
  modified_base 16: mod_base = OTHER; note = 2'-O-methylguanosine-3'-phosphate
  modified_base 17: mod_base = OTHER; note = 2'-O-methyluridine-3'-phosphate
  modified_base 18: mod_base = OTHER; note = 2'-O-methyluridine-3'-phosphate
  modified_base 19: mod_base = OTHER; note = 2'-O-methylguanosine-3'-phosphate
  modified_base 20: mod_base = OTHER; note = 2'-O-methylguanosine-3'-phosphate
  modified_base 21: mod_base = OTHER; note = 2'-O-methyladenosine-3'-phosphate ((2S,4R)-1-[29-[[2-(acetylamino)-2-deoxy-beta-D-galactopyra nosyl]oxy]-14,14-bis[[3-[[3-[[5-[[2-(acetylamino)-2-deoxy-b eta-D-galactopyranosyl]oxy]-1-oxopentyl]amino]propyl]amino] -3-oxopropoxy]methyl]-1,12,19,25-tetraoxo-16-oxa-13,20,24-t riazanonacos-1-yl]-4-hydroxy-2-pyrrolidinyl)methyl ester
gatgaagagaggcatgttgga

SEQ ID NO: 1125 - RNA, 21 nt, synthetic construct
  source 1..21: mol_type = other RNA
  modified_base 1: mod_base = OTHER; note = 2'-O-methyladenosine-3'-phosphorothioate
  modified_base 2: mod_base = OTHER; note = 2'-O-methyluridine-3'-phosphorothioate
  modified_base 3: mod_base = OTHER; note = 2'-O-methylguanosine-3'-phosphate
  modified_base 4: mod_base = OTHER; note = 2'-O-methyladenosine-3'-phosphate
  modified_base 5: mod_base = OTHER; note = 2'-O-methyladenosine-3'-phosphate
  modified_base 6: mod_base = OTHER; note = 2'-O-hexadecyl-guanosine-3'-phosphate
  modified_base 7: mod_base = OTHER; note = 2'-deoxy-2'-fluoroadenosine-3'-phosphate
  modified_base 8: mod_base = OTHER; note = 2'-O-methylguanosine-3'-phosphate
  modified_base 9: mod_base = OTHER; note = 2'-deoxy-2'-fluoroadenosine-3'-phosphate
  modified_base 10: mod_base = OTHER; note = 2'-deoxy-2'-fluoroguanosine-3'-phosphate
  modified_base 11: mod_base = OTHER; note = 2'-deoxy-2'-fluoroguanosine-3'-phosphate
  modified_base 12: mod_base = OTHER; note = 2'-O-methylcytidine-3'-phosphate
  modified_base 13: mod_base = OTHER; note = 2'-O-methyladenosine-3'-phosphate
  modified_base 14: mod_base = OTHER; note = 2'-O-methyluridine-3'-phosphate
  modified_base 15: mod_base = OTHER; note = 2'-O-methylguanosine-3'-phosphate
  modified_base 16: mod_base = OTHER; note = 2'-O-methyluridine-3'-phosphate
  modified_base 17: mod_base = OTHER; note = 2'-O-methyluridine-3'-phosphate
  modified_base 18: mod_base = OTHER; note = 2'-O-methylguanosine-3'-phosphate
  modified_base 19: mod_base = OTHER; note = 2'-O-methylguanosine-3'-phosphate
  modified_base 20: mod_base = OTHER; note = 2'-O-methyladenosine-3'-phosphate
  modified_base 21: mod_base = OTHER; note = 2'-O-methyluridine-3'-phosphate ((2S,4R)-1-[29-[[2-(acetylamino)-2-deoxy-beta-D-galactopyra nosyl]oxy]-14,14-bis[[3-[[3-[[5-[[2-(acetylamino)-2-deoxy-b eta-D-galactopyranosyl]oxy]-1-oxopentyl]amino]propyl]amino] -3-oxopropoxy]methyl]-1,12,19,25-tetraoxo-16-oxa-13,20,24-t riazanonacos-1-yl]-4-hydroxy-2-pyrrolidinyl)methyl ester
atgaagagaggcatgttggat

SEQ ID NO: 1126 - RNA, 21 nt, synthetic construct
  source 1..21: mol_type = other RNA
  modified_base 1: mod_base = OTHER; note = 2'-O-methyluridine-3'-phosphorothioate
  modified_base 2: mod_base = OTHER; note = 2'-O-methylguanosine-3'-phosphorothioate
  modified_base 3: mod_base = OTHER; note = 2'-O-methyladenosine-3'-phosphate
  modified_base 4: mod_base = OTHER; note = 2'-O-methyladenosine-3'-phosphate
  modified_base 5: mod_base = OTHER; note = 2'-O-methylguanosine-3'-phosphate
  modified_base 6: mod_base = OTHER; note = 2'-O-hexadecyl-adenosine-3'-phosphate
  modified_base 7: mod_base = OTHER; note = 2'-deoxy-2'-fluoroguanosine-3'-phosphate
  modified_base 8: mod_base = OTHER; note = 2'-O-methyladenosine-3'-phosphate
  modified_base 9: mod_base = OTHER; note = 2'-deoxy-2'-fluoroguanosine-3'-phosphate
  modified_base 10: mod_base = OTHER; note = 2'-deoxy-2'-fluoroguanosine-3'-phosphate
  modified_base 11: mod_base = OTHER; note = 2'-deoxy-2'-fluorocytidine-3'-phosphate
  modified_base 12: mod_base = OTHER; note = 2'-O-methyladenosine-3'-phosphate
  modified_base 13: mod_base = OTHER; note = 2'-O-methyluridine-3'-phosphate
  modified_base 14: mod_base = OTHER; note = 2'-O-methylguanosine-3'-phosphate
  modified_base 15: mod_base = OTHER; note = 2'-O-methyluridine-3'-phosphate
  modified_base 16: mod_base = OTHER; note = 2'-O-methyluridine-3'-phosphate
  modified_base 17: mod_base = OTHER; note = 2'-O-methylguanosine-3'-phosphate
  modified_base 18: mod_base = OTHER; note = 2'-O-methylguanosine-3'-phosphate
  modified_base 19: mod_base = OTHER; note = 2'-O-methyladenosine-3'-phosphate
  modified_base 20: mod_base = OTHER; note = 2'-O-methylguanosine-3'-phosphate
  modified_base 21: mod_base = OTHER; note = 2'-O-methyladenosine-3'-phosphate ((2S,4R)-1-[29-[[2-(acetylamino)-2-deoxy-beta-D-galactopyra nosyl]oxy]-14,14-bis[[3-[[3-[[5-[[2-(acetylamino)-2-deoxy-b eta-D-galactopyranosyl]oxy]-1-oxopentyl]amino]propyl]amino] -3-oxopropoxy]methyl]-1,12,19,25-tetraoxo-16-oxa-13,20,24-t riazanonacos-1-yl]-4-hydroxy-2-pyrrolidinyl)methyl ester
tgaagagaggcatgttggaga

SEQ ID NO: 1127 - RNA, 21 nt, synthetic construct
  source 1..21: mol_type = other RNA
  modified_base 1: mod_base = OTHER; note = 2'-O-methylguanosine-3'-phosphorothioate
  modified_base 2: mod_base = OTHER; note = 2'-O-methyladenosine-3'-phosphorothioate
  modified_base 3: mod_base = OTHER; note = 2'-O-methyladenosine-3'-phosphate
  modified_base 4: mod_base = OTHER; note = 2'-O-methylguanosine-3'-phosphate
  modified_base 5: mod_base = OTHER; note = 2'-O-methyladenosine-3'-phosphate
  modified_base 6: mod_base = OTHER; note = 2'-O-hexadecyl-guanosine-3'-phosphate
  modified_base 7: mod_base = OTHER; note = 2'-deoxy-2'-fluoroadenosine-3'-phosphate
  modified_base 8: mod_base = OTHER; note = 2'-O-methylguanosine-3'-phosphate
  modified_base 9: mod_base = OTHER; note = 2'-deoxy-2'-fluoroguanosine-3'-phosphate
  modified_base 10: mod_base = OTHER; note = 2'-deoxy-2'-fluorocytidine-3'-phosphate
  modified_base 11: mod_base = OTHER; note = 2'-deoxy-2'-fluoroadenosine-3'-phosphate
  modified_base 12: mod_base = OTHER; note = 2'-O-methyluridine-3'-phosphate
  modified_base 13: mod_base = OTHER; note = 2'-O-methylguanosine-3'-phosphate
  modified_base 14: mod_base = OTHER; note = 2'-O-methyluridine-3'-phosphate
  modified_base 15: mod_base = OTHER; note = 2'-O-methyluridine-3'-phosphate
  modified_base 16: mod_base = OTHER; note = 2'-O-methylguanosine-3'-phosphate
  modified_base 17: mod_base = OTHER; note = 2'-O-methylguanosine-3'-phosphate
  modified_base 18: mod_base = OTHER; note = 2'-O-methyladenosine-3'-phosphate
  modified_base 19: mod_base = OTHER; note = 2'-O-methylguanosine-3'-phosphate
  modified_base 20: mod_base = OTHER; note = 2'-O-methyladenosine-3'-phosphate
  modified_base 21: mod_base = OTHER; note = 2'-O-methyluridine-3'-phosphate ((2S,4R)-1-[29-[[2-(acetylamino)-2-deoxy-beta-D-galactopyra nosyl]oxy]-14,14-bis[[3-[[3-[[5-[[2-(acetylamino)-2-deoxy-b eta-D-galactopyranosyl]oxy]-1-oxopentyl]amino]propyl]amino] -3-oxopropoxy]methyl]-1,12,19,25-tetraoxo-16-oxa-13,20,24-t riazanonacos-1-yl]-4-hydroxy-2-pyrrolidinyl)methyl ester
gaagagaggcatgttggagat

SEQ ID NO: 1128 - RNA, 21 nt, synthetic construct
  source 1..21: mol_type = other RNA
  modified_base 1: mod_base = OTHER; note = 2'-O-methyladenosine-3'-phosphorothioate
  modified_base 2: mod_base = OTHER; note = 2'-O-methyladenosine-3'-phosphorothioate
  modified_base 3: mod_base = OTHER; note = 2'-O-methylguanosine-3'-phosphate
  modified_base 4: mod_base = OTHER; note = 2'-O-methyladenosine-3'-phosphate
  modified_base 5: mod_base = OTHER; note = 2'-O-methylguanosine-3'-phosphate
  modified_base 6: mod_base = OTHER; note = 2'-O-hexadecyl-adenosine-3'-phosphate
  modified_base 7: mod_base = OTHER; note = 2'-deoxy-2'-fluoroguanosine-3'-phosphate
  modified_base 8: mod_base = OTHER; note = 2'-O-methylguanosine-3'-phosphate
  modified_base 9: mod_base = OTHER; note = 2'-deoxy-2'-fluorocytidine-3'-phosphate
  modified_base 10: mod_base = OTHER; note = 2'-deoxy-2'-fluoroadenosine-3'-phosphate
  modified_base 11: mod_base = OTHER; note = 2'-deoxy-2'-fluorouridine-3'-phosphate
  modified_base 12: mod_base = OTHER; note = 2'-O-methylguanosine-3'-phosphate
  modified_base 13: mod_base = OTHER; note = 2'-O-methyluridine-3'-phosphate
  modified_base 14: mod_base = OTHER; note = 2'-O-methyluridine-3'-phosphate
  modified_base 15: mod_base = OTHER; note = 2'-O-methylguanosine-3'-phosphate
  modified_base 16: mod_base = OTHER; note = 2'-O-methylguanosine-3'-phosphate
  modified_base 17: mod_base = OTHER; note = 2'-O-methyladenosine-3'-phosphate
  modified_base 18: mod_base = OTHER; note = 2'-O-methylguanosine-3'-phosphate
  modified_base 19: mod_base = OTHER; note = 2'-O-methyladenosine-3'-phosphate
  modified_base 20: mod_base = OTHER; note = 2'-O-methylcytidine-3'-phosphate
  modified_base 21: mod_base = OTHER; note = 2'-O-methyluridine-3'-phosphate ((2S,4R)-1-[29-[[2-(acetylamino)-2-deoxy-beta-D-galactopyra nosyl]oxy]-14,14-bis[[3-[[3-[[5-[[2-(acetylamino)-2-deoxy-b eta-D-galactopyranosyl]oxy]-1-oxopentyl]amino]propyl]amino] -3-oxopropoxy]methyl]-1,12,19,25-tetraoxo-16-oxa-13,20,24-t riazanonacos-1-yl]-4-hydroxy-2-pyrrolidinyl)methyl ester
aagagaggcatgttggagact

SEQ ID NO: 1129 - RNA, 21 nt, synthetic construct
  source 1..21: mol_type = other RNA
  modified_base 1: mod_base = OTHER; note = 2'-O-methyladenosine-3'-phosphorothioate
  modified_base 2: mod_base = OTHER; note = 2'-O-methylguanosine-3'-phosphorothioate
  modified_base 3: mod_base = OTHER; note = 2'-O-methyladenosine-3'-phosphate
  modified_base 4: mod_base = OTHER; note = 2'-O-methylguanosine-3'-phosphate
  modified_base 5: mod_base = OTHER; note = 2'-O-methyladenosine-3'-phosphate
  modified_base 6: mod_base = OTHER; note = 2'-O-hexadecyl-guanosine-3'-phosphate
  modified_base 7: mod_base = OTHER; note = 2'-deoxy-2'-fluoroguanosine-3'-phosphate
  modified_base 8: mod_base = OTHER; note = 2'-O-methylcytidine-3'-phosphate
  modified_base 9: mod_base = OTHER; note = 2'-deoxy-2'-fluoroadenosine-3'-phosphate
  modified_base 10: mod_base = OTHER; note = 2'-deoxy-2'-fluorouridine-3'-phosphate
  modified_base 11: mod_base = OTHER; note = 2'-deoxy-2'-fluoroguanosine-3'-phosphate
  modified_base 12: mod_base = OTHER; note = 2'-O-methyluridine-3'-phosphate
  modified_base 13: mod_base = OTHER; note = 2'-O-methyluridine-3'-phosphate
  modified_base 14: mod_base = OTHER; note = 2'-O-methylguanosine-3'-phosphate
  modified_base 15: mod_base = OTHER; note = 2'-O-methylguanosine-3'-phosphate
  modified_base 16: mod_base = OTHER; note = 2'-O-methyladenosine-3'-phosphate
  modified_base 17: mod_base = OTHER; note = 2'-O-methylguanosine-3'-phosphate
  modified_base 18: mod_base = OTHER; note = 2'-O-methyladenosine-3'-phosphate
  modified_base 19: mod_base = OTHER; note = 2'-O-methylcytidine-3'-phosphate
  modified_base 20: mod_base = OTHER; note = 2'-O-methyluridine-3'-phosphate
  modified_base 21: mod_base = OTHER; note = 2'-O-methyluridine-3'-phosphate ((2S,4R)-1-[29-[[2-(acetylamino)-2-deoxy-beta-D-galactopyra nosyl]oxy]-14,14-bis[[3-[[3-[[5-[[2-(acetylamino)-2-deoxy-b eta-D-galactopyranosyl]oxy]-1-oxopentyl]amino]propyl]amino] -3-oxopropoxy]methyl]-1,12,19,25-tetraoxo-16-oxa-13,20,24-t riazanonacos-1-yl]-4-hydroxy-2-pyrrolidinyl)methyl ester
agagaggcatgttggagactt

SEQ ID NO: 1130 - RNA, 21 nt, synthetic construct
  source 1..21: mol_type = other RNA
  modified_base 1: mod_base = OTHER; note = 2'-O-methylguanosine-3'-phosphorothioate
  modified_base 2: mod_base = OTHER; note = 2'-O-methyladenosine-3'-phosphorothioate
  modified_base 3: mod_base = OTHER; note = 2'-O-methylguanosine-3'-phosphate
  modified_base 4: mod_base = OTHER; note = 2'-O-methyladenosine-3'-phosphate
  modified_base 5: mod_base = OTHER; note = 2'-O-methylguanosine-3'-phosphate
  modified_base 6: mod_base = OTHER; note = 2'-O-hexadecyl-guanosine-3'-phosphate
  modified_base 7: mod_base = OTHER; note = 2'-deoxy-2'-fluorocytidine-3'-phosphate
  modified_base 8: mod_base = OTHER; note = 2'-O-methyladenosine-3'-phosphate
  modified_base 9: mod_base = OTHER; note = 2'-deoxy-2'-fluorouridine-3'-phosphate
  modified_base 10: mod_base = OTHER; note = 2'-deoxy-2'-fluoroguanosine-3'-phosphate
  modified_base 11: mod_base = OTHER; note = 2'-deoxy-2'-fluorouridine-3'-phosphate
  modified_base 12: mod_base = OTHER; note = 2'-O-methyluridine-3'-phosphate
  modified_base 13: mod_base = OTHER; note = 2'-O-methylguanosine-3'-phosphate
  modified_base 14: mod_base = OTHER; note = 2'-O-methylguanosine-3'-phosphate
  modified_base 15: mod_base = OTHER; note = 2'-O-methyladenosine-3'-phosphate
  modified_base 16: mod_base = OTHER; note = 2'-O-methylguanosine-3'-phosphate
  modified_base 17: mod_base = OTHER; note = 2'-O-methyladenosine-3'-phosphate
  modified_base 18: mod_base = OTHER; note = 2'-O-methylcytidine-3'-phosphate
  modified_base 19: mod_base = OTHER; note = 2'-O-methyluridine-3'-phosphate
  modified_base 20: mod_base = OTHER; note = 2'-O-methyluridine-3'-phosphate
  modified_base 21: mod_base = OTHER; note = 2'-O-methyluridine-3'-phosphate ((2S,4R)-1-[29-[[2-(acetylamino)-2-deoxy-beta-D-galactopyra nosyl]oxy]-14,14-bis[[3-[[3-[[5-[[2-(acetylamino)-2-deoxy-b eta-D-galactopyranosyl]oxy]-1-oxopentyl]amino]propyl]amino] -3-oxopropoxy]methyl]-1,12,19,25-tetraoxo-16-oxa-13,20,24-t riazanonacos-1-yl]-4-hydroxy-2-pyrrolidinyl)methyl ester
gagaggcatgttggagacttt

SEQ ID NO: 1131 - RNA, 21 nt, synthetic construct
  source 1..21: mol_type = other RNA
  modified_base 1: mod_base = OTHER; note = 2'-O-methyladenosine-3'-phosphorothioate
  modified_base 2: mod_base = OTHER; note = 2'-O-methylguanosine-3'-phosphorothioate
  modified_base 3: mod_base = OTHER; note = 2'-O-methyladenosine-3'-phosphate
  modified_base 4: mod_base = OTHER; note = 2'-O-methylguanosine-3'-phosphate
  modified_base 5: mod_base = OTHER; note = 2'-O-methylguanosine-3'-phosphate
  modified_base 6: mod_base = OTHER; note = 2'-O-hexadecyl-cytidine-3'-phosphate
  modified_base 7: mod_base = OTHER; note = 2'-deoxy-2'-fluoroadenosine-3'-phosphate
  modified_base 8: mod_base = OTHER; note = 2'-O-methyluridine-3'-phosphate
  modified_base 9: mod_base = OTHER; note = 2'-deoxy-2'-fluoroguanosine-3'-phosphate
  modified_base 10: mod_base = OTHER; note = 2'-deoxy-2'-fluorouridine-3'-phosphate
  modified_base 11: mod_base = OTHER; note = 2'-deoxy-2'-fluorouridine-3'-phosphate
  modified_base 12: mod_base = OTHER; note = 2'-O-methylguanosine-3'-phosphate
  modified_base 13: mod_base = OTHER; note = 2'-O-methylguanosine-3'-phosphate
  modified_base 14: mod_base = OTHER; note = 2'-O-methyladenosine-3'-phosphate
  modified_base 15: mod_base = OTHER; note = 2'-O-methylguanosine-3'-phosphate
  modified_base 16: mod_base = OTHER; note = 2'-O-methyladenosine-3'-phosphate
  modified_base 17: mod_base = OTHER; note = 2'-O-methylcytidine-3'-phosphate
  modified_base 18: mod_base = OTHER; note = 2'-O-methyluridine-3'-phosphate
  modified_base 19: mod_base = OTHER; note = 2'-O-methyluridine-3'-phosphate
  modified_base 20: mod_base = OTHER; note = 2'-O-methylguanosine-3'-phosphate
  modified_base 21: mod_base = OTHER; note = 2'-O-methyluridine-3'-phosphate ((2S,4R)-1-[29-[[2-(acetylamino)-2-deoxy-beta-D-galactopyra nosyl]oxy]-14,14-bis[[3-[[3-[[5-[[2-(acetylamino)-2-deoxy-b eta-D-galactopyranosyl]oxy]-1-oxopentyl]amino]propyl]amino] -3-oxopropoxy]methyl]-1,12,19,25-tetraoxo-16-oxa-13,20,24-t riazanonacos-1-yl]-4-hydroxy-2-pyrrolidinyl)methyl ester
agaggcatgttggagacttgt

SEQ ID NO: 1132 - RNA, 21 nt, synthetic construct
  source 1..21: mol_type = other RNA
  modified_base 1: mod_base = OTHER; note = 2'-O-methylguanosine-3'-phosphorothioate
  modified_base 2: mod_base = OTHER; note = 2'-O-methylcytidine-3'-phosphorothioate
  modified_base 3: mod_base = OTHER; note = 2'-O-methyladenosine-3'-phosphate
  modified_base 4: mod_base = OTHER; note = 2'-O-methylguanosine-3'-phosphate
  modified_base 5: mod_base = OTHER; note = 2'-O-methyladenosine-3'-phosphate
  modified_base 6: mod_base = OTHER; note = 2'-O-hexadecyl-uridine-3'-phosphate
  modified_base 7: mod_base = OTHER; note = 2'-deoxy-2'-fluoroguanosine-3'-phosphate
  modified_base 8: mod_base = OTHER; note = 2'-O-methyladenosine-3'-phosphate
  modified_base 9: mod_base = OTHER; note = 2'-deoxy-2'-fluorocytidine-3'-phosphate
  modified_base 10: mod_base = OTHER; note = 2'-deoxy-2'-fluorouridine-3'-phosphate
  modified_base 11: mod_base = OTHER; note = 2'-deoxy-2'-fluorouridine-3'-phosphate
  modified_base 12: mod_base = OTHER; note = 2'-O-methylguanosine-3'-phosphate
  modified_base 13: mod_base = OTHER; note = 2'-O-methylguanosine-3'-phosphate
  modified_base 14: mod_base = OTHER; note = 2'-O-methylguanosine-3'-phosphate
  modified_base 15: mod_base = OTHER; note = 2'-O-methylcytidine-3'-phosphate
  modified_base 16: mod_base = OTHER; note = 2'-O-methyladenosine-3'-phosphate
  modified_base 17: mod_base = OTHER; note = 2'-O-methyladenosine-3'-phosphate
  modified_base 18: mod_base = OTHER; note = 2'-O-methyladenosine-3'-phosphate
  modified_base 19: mod_base = OTHER; note = 2'-O-methylguanosine-3'-phosphate
  modified_base 20: mod_base = OTHER; note = 2'-O-methylguanosine-3'-phosphate
  modified_base 21: mod_base = OTHER; note = 2'-O-methyluridine-3'-phosphate ((2S,4R)-1-[29-[[2-(acetylamino)-2-deoxy-beta-D-galactopyra nosyl]oxy]-14,14-bis[[3-[[3-[[5-[[2-(acetylamino)-2-deoxy-b eta-D-galactopyranosyl]oxy]-1-oxopentyl]amino]propyl]amino] -3-oxopropoxy]methyl]-1,12,19,25-tetraoxo-16-oxa-13,20,24-t riazanonacos-1-yl]-4-hydroxy-2-pyrrolidinyl)methyl ester
gcagatgacttgggcaaaggt

SEQ ID NO: 1133 - RNA, 21 nt, synthetic construct
  source 1..21: mol_type = other RNA
  modified_base 1: mod_base = OTHER; note = 2'-O-methylcytidine-3'-phosphorothioate
  modified_base 2: mod_base = OTHER; note = 2'-O-methyladenosine-3'-phosphorothioate
  modified_base 3: mod_base = OTHER; note = 2'-O-methylguanosine-3'-phosphate
  modified_base 4: mod_base = OTHER; note = 2'-O-methyladenosine-3'-phosphate
  modified_base 5: mod_base = OTHER; note = 2'-O-methyluridine-3'-phosphate
  modified_base 6: mod_base = OTHER; note = 2'-O-hexadecyl-guanosine-3'-phosphate
  modified_base 7: mod_base = OTHER; note = 2'-deoxy-2'-fluoroadenosine-3'-phosphate
  modified_base 8: mod_base = OTHER; note = 2'-O-methylcytidine-3'-phosphate
  modified_base 9: mod_base = OTHER; note = 2'-deoxy-2'-fluorouridine-3'-phosphate
  modified_base 10: mod_base = OTHER; note = 2'-deoxy-2'-fluorouridine-3'-phosphate
  modified_base 11: mod_base = OTHER; note = 2'-deoxy-2'-fluoroguanosine-3'-phosphate
  modified_base 12: mod_base = OTHER; note = 2'-O-methylguanosine-3'-phosphate
  modified_base 13: mod_base = OTHER; note = 2'-O-methylguanosine-3'-phosphate
  modified_base 14: mod_base = OTHER; note = 2'-O-methylcytidine-3'-phosphate
  modified_base 15: mod_base = OTHER; note = 2'-O-methyladenosine-3'-phosphate
  modified_base 16: mod_base = OTHER; note = 2'-O-methyladenosine-3'-phosphate
  modified_base 17: mod_base = OTHER; note = 2'-O-methyladenosine-3'-phosphate
  modified_base 18: mod_base = OTHER; note = 2'-O-methylguanosine-3'-phosphate
  modified_base 19: mod_base = OTHER; note = 2'-O-methylguanosine-3'-phosphate
  modified_base 20: mod_base = OTHER; note = 2'-O-methyluridine-3'-phosphate
  modified_base 21: mod_base = OTHER; note = 2'-O-methyluridine-3'-phosphate ((2S,4R)-1-[29-[[2-(acetylamino)-2-deoxy-beta-D-galactopyra nosyl]oxy]-14,14-bis[[3-[[3-[[5-[[2-(acetylamino)-2-deoxy-b eta-D-galactopyranosyl]oxy]-1-oxopentyl]amino]propyl]amino] -3-oxopropoxy]methyl]-1,12,19,25-tetraoxo-16-oxa-13,20,24-t riazanonacos-1-yl]-4-hydroxy-2-pyrrolidinyl)methyl ester
cagatgacttgggcaaaggtt

SEQ ID NO: 1134 - RNA, 21 nt, synthetic construct
  source 1..21: mol_type = other RNA
  modified_base 1: mod_base = OTHER; note = 2'-O-methyladenosine-3'-phosphorothioate
  modified_base 2: mod_base = OTHER; note = 2'-O-methylguanosine-3'-phosphorothioate
  modified_base 3: mod_base = OTHER; note = 2'-O-methyladenosine-3'-phosphate
  modified_base 4: mod_base = OTHER; note = 2'-O-methyluridine-3'-phosphate
  modified_base 5: mod_base = OTHER; note = 2'-O-methylguanosine-3'-phosphate
  modified_base 6: mod_base = OTHER; note = 2'-O-hexadecyl-adenosine-3'-phosphate
  modified_base 7: mod_base = OTHER; note = 2'-deoxy-2'-fluorocytidine-3'-phosphate
  modified_base 8: mod_base = OTHER; note = 2'-O-methyluridine-3'-phosphate
  modified_base 9: mod_base = OTHER; note = 2'-deoxy-2'-fluorouridine-3'-phosphate
  modified_base 10: mod_base = OTHER; note = 2'-deoxy-2'-fluoroguanosine-3'-phosphate
  modified_base 11: mod_base = OTHER; note = 2'-deoxy-2'-fluoroguanosine-3'-phosphate
  modified_base 12: mod_base = OTHER; note = 2'-O-methylguanosine-3'-phosphate
  modified_base 13: mod_base = OTHER; note = 2'-O-methylcytidine-3'-phosphate
  modified_base 14: mod_base = OTHER; note = 2'-O-methyladenosine-3'-phosphate
  modified_base 15: mod_base = OTHER; note = 2'-O-methyladenosine-3'-phosphate
  modified_base 16: mod_base = OTHER; note = 2'-O-methyladenosine-3'-phosphate
  modified_base 17: mod_base = OTHER; note = 2'-O-methylguanosine-3'-phosphate
  modified_base 18: mod_base = OTHER; note = 2'-O-methylguanosine-3'-phosphate
  modified_base 19: mod_base = OTHER; note = 2'-O-methyluridine-3'-phosphate
  modified_base 20: mod_base = OTHER; note = 2'-O-methylguanosine-3'-phosphate
  modified_base 21: mod_base = OTHER; note = 2'-O-methyluridine-3'-phosphate ((2S,4R)-1-[29-[[2-(acetylamino)-2-deoxy-beta-D-galactopyra nosyl]oxy]-14,14-bis[[3-[[3-[[5-[[2-(acetylamino)-2-deoxy-b eta-D-galactopyranosyl]oxy]-1-oxopentyl]amino]propyl]amino] -3-oxopropoxy]methyl]-1,12,19,25-tetraoxo-16-oxa-13,20,24-t riazanonacos-1-yl]-4-hydroxy-2-pyrrolidinyl)methyl ester
agatgacttgggcaaaggtgt

SEQ ID NO: 1135 - RNA, 21 nt, synthetic construct
  source 1..21: mol_type = other RNA
  modified_base 1: mod_base = OTHER; note = 2'-O-methylguanosine-3'-phosphorothioate
  modified_base 2: mod_base = OTHER; note = 2'-O-methyladenosine-3'-phosphorothioate
  modified_base 3: mod_base = OTHER; note = 2'-O-methyluridine-3'-phosphate
  modified_base 4: mod_base = OTHER; note = 2'-O-methylguanosine-3'-phosphate
  modified_base 5: mod_base = OTHER; note = 2'-O-methyladenosine-3'-phosphate
  modified_base 6: mod_base = OTHER; note = 2'-O-hexadecyl-cytidine-3'-phosphate
  modified_base 7: mod_base = OTHER; note = 2'-deoxy-2'-fluorouridine-3'-phosphate
  modified_base 8: mod_base = OTHER; note = 2'-O-methyluridine-3'-phosphate
  modified_base 9: mod_base = OTHER; note = 2'-deoxy-2'-fluoroguanosine-3'-phosphate
  modified_base 10: mod_base = OTHER; note = 2'-deoxy-2'-fluoroguanosine-3'-phosphate
  modified_base 11: mod_base = OTHER; note = 2'-deoxy-2'-fluoroguanosine-3'-phosphate
  modified_base 12: mod_base = OTHER; note = 2'-O-methylcytidine-3'-phosphate
  modified_base 13: mod_base = OTHER; note = 2'-O-methyladenosine-3'-phosphate
  modified_base 14: mod_base = OTHER; note = 2'-O-methyladenosine-3'-phosphate
  modified_base 15: mod_base = OTHER; note = 2'-O-methyladenosine-3'-phosphate
  modified_base 16: mod_base = OTHER; note = 2'-O-methylguanosine-3'-phosphate
  modified_base 17: mod_base = OTHER; note = 2'-O-methylguanosine-3'-phosphate
  modified_base 18: mod_base = OTHER; note = 2'-O-methyluridine-3'-phosphate
  modified_base 19: mod_base = OTHER; note = 2'-O-methylguanosine-3'-phosphate
  modified_base 20: mod_base = OTHER; note = 2'-O-methylguanosine-3'-phosphate
  modified_base 21: mod_base = OTHER; note = 2'-O-methyladenosine-3'-phosphate ((2S,4R)-1-[29-[[2-(acetylamino)-2-deoxy-beta-D-galactopyra nosyl]oxy]-14,14-bis[[3-[[3-[[5-[[2-(acetylamino)-2-deoxy-b eta-D-galactopyranosyl]oxy]-1-oxopentyl]amino]propyl]amino] -3-oxopropoxy]methyl]-1,12,19,25-tetraoxo-16-oxa-13,20,24-t riazanonacos-1-yl]-4-hydroxy-2-pyrrolidinyl)methyl ester
gatgacttgggcaaaggtgga

SEQ ID NO: 1136 - RNA, 21 nt, synthetic construct
  source 1..21: mol_type = other RNA
  modified_base 1: mod_base = OTHER; note = 2'-O-methyladenosine-3'-phosphorothioate
  modified_base 2: mod_base = OTHER; note = 2'-O-methyluridine-3'-phosphorothioate
  modified_base 3: mod_base = OTHER; note = 2'-O-methylguanosine-3'-phosphate
  modified_base 4: mod_base = OTHER; note = 2'-O-methyladenosine-3'-phosphate
  modified_base 5: mod_base = OTHER; note = 2'-O-methylcytidine-3'-phosphate
  modified_base 6: mod_base = OTHER; note = 2'-O-hexadecyl-uridine-3'-phosphate
  modified_base 7: mod_base = OTHER; note = 2'-deoxy-2'-fluorouridine-3'-phosphate
  modified_base 8: mod_base = OTHER; note = 2'-O-methylguanosine-3'-phosphate
  modified_base 9: mod_base = OTHER; note = 2'-deoxy-2'-fluoroguanosine-3'-phosphate
  modified_base 10: mod_base = OTHER; note = 2'-deoxy-2'-fluoroguanosine-3'-phosphate
  modified_base 11: mod_base = OTHER; note = 2'-deoxy-2'-fluorocytidine-3'-phosphate
  modified_base 12: mod_base = OTHER; note = 2'-O-methyladenosine-3'-phosphate
  modified_base 13: mod_base = OTHER; note = 2'-O-methyladenosine-3'-phosphate
  modified_base 14: mod_base = OTHER; note = 2'-O-methyladenosine-3'-phosphate
  modified_base 15: mod_base = OTHER; note = 2'-O-methylguanosine-3'-phosphate
  modified_base 16: mod_base = OTHER; note = 2'-O-methylguanosine-3'-phosphate
  modified_base 17: mod_base = OTHER; note = 2'-O-methyluridine-3'-phosphate
  modified_base 18: mod_base = OTHER; note = 2'-O-methylguanosine-3'-phosphate
  modified_base 19: mod_base = OTHER; note = 2'-O-methylguanosine-3'-phosphate
  modified_base 20: mod_base = OTHER; note = 2'-O-methyladenosine-3'-phosphate
  modified_base 21: mod_base = OTHER; note = 2'-O-methyladenosine-3'-phosphate ((2S,4R)-1-[29-[[2-(acetylamino)-2-deoxy-beta-D-galactopyra nosyl]oxy]-14,14-bis[[3-[[3-[[5-[[2-(acetylamino)-2-deoxy-b eta-D-galactopyranosyl]oxy]-1-oxopentyl]amino]propyl]amino] -3-oxopropoxy]methyl]-1,12,19,25-tetraoxo-16-oxa-13,20,24-t riazanonacos-1-yl]-4-hydroxy-2-pyrrolidinyl)methyl ester
atgacttgggcaaaggtggaa

SEQ ID NO: 1137 - RNA, 21 nt, synthetic construct
  source 1..21: mol_type = other RNA
  modified_base 1: mod_base = OTHER; note = 2'-O-methyluridine-3'-phosphorothioate
  modified_base 2: mod_base = OTHER; note = 2'-O-methylguanosine-3'-phosphorothioate
  modified_base 3: mod_base = OTHER; note = 2'-O-methyladenosine-3'-phosphate
  modified_base 4: mod_base = OTHER; note = 2'-O-methylcytidine-3'-phosphate
  modified_base 5: mod_base = OTHER; note = 2'-O-methyluridine-3'-phosphate
  modified_base 6: mod_base = OTHER; note = 2'-O-hexadecyl-uridine-3'-phosphate
  modified_base 7: mod_base = OTHER; note = 2'-deoxy-2'-fluoroguanosine-3'-phosphate
  modified_base 8: mod_base = OTHER; note = 2'-O-methylguanosine-3'-phosphate
  modified_base 9: mod_base = OTHER; note = 2'-deoxy-2'-fluoroguanosine-3'-phosphate
  modified_base 10: mod_base = OTHER; note = 2'-deoxy-2'-fluorocytidine-3'-phosphate
  modified_base 11: mod_base = OTHER; note = 2'-deoxy-2'-fluoroadenosine-3'-phosphate
  modified_base 12: mod_base = OTHER; note = 2'-O-methyladenosine-3'-phosphate
  modified_base 13: mod_base = OTHER; note = 2'-O-methyladenosine-3'-phosphate
  modified_base 14: mod_base = OTHER; note = 2'-O-methylguanosine-3'-phosphate
  modified_base 15: mod_base = OTHER; note = 2'-O-methylguanosine-3'-phosphate
  modified_base 16: mod_base = OTHER; note = 2'-O-methyluridine-3'-phosphate
  modified_base 17: mod_base = OTHER; note = 2'-O-methylguanosine-3'-phosphate
  modified_base 18: mod_base = OTHER; note = 2'-O-methylguanosine-3'-phosphate
  modified_base 19: mod_base = OTHER; note = 2'-O-methyladenosine-3'-phosphate
  modified_base 20: mod_base = OTHER; note = 2'-O-methyladenosine-3'-phosphate
  modified_base 21: mod_base = OTHER; note = 2'-O-methyladenosine-3'-phosphate ((2S,4R)-1-[29-[[2-(acetylamino)-2-deoxy-beta-D-galactopyra nosyl]oxy]-14,14-bis[[3-[[3-[[5-[[2-(acetylamino)-2-deoxy-b eta-D-galactopyranosyl]oxy]-1-oxopentyl]amino]propyl]amino] -3-oxopropoxy]methyl]-1,12,19,25-tetraoxo-16-oxa-13,20,24-t riazanonacos-1-yl]-4-hydroxy-2-pyrrolidinyl)methyl ester
tgacttgggcaaaggtggaaa

SEQ ID NO: 1138 - RNA, 21 nt, synthetic construct
  source 1..21: mol_type = other RNA
  modified_base 1: mod_base = OTHER; note = 2'-O-methylguanosine-3'-phosphorothioate
  modified_base 2: mod_base = OTHER; note = 2'-O-methyladenosine-3'-phosphorothioate
  modified_base 3: mod_base = OTHER; note = 2'-O-methylcytidine-3'-phosphate
  modified_base 4: mod_base = OTHER; note = 2'-O-methyluridine-3'-phosphate
  modified_base 5: mod_base = OTHER; note = 2'-O-methyluridine-3'-phosphate
  modified_base 6: mod_base = OTHER; note = 2'-O-hexadecyl-guanosine-3'-phosphate
  modified_base 7: mod_base = OTHER; note = 2'-deoxy-2'-fluoroguanosine-3'-phosphate
  modified_base 8: mod_base = OTHER; note = 2'-O-methylguanosine-3'-phosphate
  modified_base 9: mod_base = OTHER; note = 2'-deoxy-2'-fluorocytidine-3'-phosphate
  modified_base 10: mod_base = OTHER; note = 2'-deoxy-2'-fluoroadenosine-3'-phosphate
  modified_base 11: mod_base = OTHER; note = 2'-deoxy-2'-fluoroadenosine-3'-phosphate
  modified_base 12: mod_base = OTHER; note = 2'-O-methyladenosine-3'-phosphate
  modified_base 13: mod_base = OTHER; note = 2'-O-methylguanosine-3'-phosphate
  modified_base 14: mod_base = OTHER; note = 2'-O-methylguanosine-3'-phosphate
  modified_base 15: mod_base = OTHER; note = 2'-O-methyluridine-3'-phosphate
  modified_base 16: mod_base = OTHER; note = 2'-O-methylguanosine-3'-phosphate
  modified_base 17: mod_base = OTHER; note = 2'-O-methylguanosine-3'-phosphate
  modified_base 18: mod_base = OTHER; note = 2'-O-methyladenosine-3'-phosphate
  modified_base 19: mod_base = OTHER; note = 2'-O-methyladenosine-3'-phosphate
  modified_base 20: mod_base = OTHER; note = 2'-O-methyladenosine-3'-phosphate
  modified_base 21: mod_base = OTHER; note = 2'-O-methyluridine-3'-phosphate ((2S,4R)-1-[29-[[2-(acetylamino)-2-deoxy-beta-D-galactopyra nosyl]oxy]-14,14-bis[[3-[[3-[[5-[[2-(acetylamino)-2-deoxy-b eta-D-galactopyranosyl]oxy]-1-oxopentyl]amino]propyl]amino] -3-oxopropoxy]methyl]-1,12,19,25-tetraoxo-16-oxa-13,20,24-t riazanonacos-1-yl]-4-hydroxy-2-pyrrolidinyl)methyl ester
gacttgggcaaaggtggaaat

SEQ ID NO: 1139 - RNA, 21 nt, synthetic construct
  source 1..21: mol_type = other RNA
  modified_base 1: mod_base = OTHER; note = 2'-O-methyladenosine-3'-phosphorothioate
  modified_base 2: mod_base = OTHER; note = 2'-O-methylcytidine-3'-phosphorothioate
  modified_base 3: mod_base = OTHER; note = 2'-O-methyluridine-3'-phosphate
  modified_base 4: mod_base = OTHER; note = 2'-O-methyluridine-3'-phosphate
  modified_base 5: mod_base = OTHER; note = 2'-O-methylguanosine-3'-phosphate
  modified_base 6: mod_base = OTHER; note = 2'-O-hexadecyl-guanosine-3'-phosphate
  modified_base 7: mod_base = OTHER; note = 2'-deoxy-2'-fluoroguanosine-3'-phosphate
  modified_base 8: mod_base = OTHER; note = 2'-O-methylcytidine-3'-phosphate
  modified_base 9: mod_base = OTHER; note = 2'-deoxy-2'-fluoroadenosine-3'-phosphate
  modified_base 10: mod_base = OTHER; note = 2'-deoxy-2'-fluoroadenosine-3'-phosphate
  modified_base 11: mod_base = OTHER; note = 2'-deoxy-2'-fluoroadenosine-3'-phosphate
  modified_base 12: mod_base = OTHER; note = 2'-O-methylguanosine-3'-phosphate
  modified_base 13: mod_base = OTHER; note = 2'-O-methylguanosine-3'-phosphate
  modified_base 14: mod_base = OTHER; note = 2'-O-methyluridine-3'-phosphate
  modified_base 15: mod_base = OTHER; note = 2'-O-methylguanosine-3'-phosphate
  modified_base 16: mod_base = OTHER; note = 2'-O-methylguanosine-3'-phosphate
  modified_base 17: mod_base = OTHER; note = 2'-O-methyladenosine-3'-phosphate
  modified_base 18: mod_base = OTHER; note = 2'-O-methyladenosine-3'-phosphate
  modified_base 19: mod_base = OTHER; note = 2'-O-methyladenosine-3'-phosphate
  modified_base 20: mod_base = OTHER; note = 2'-O-methyluridine-3'-phosphate
  modified_base 21: mod_base = OTHER; note = 2'-O-methyluridine-3'-phosphate ((2S,4R)-1-[29-[[2-(acetylamino)-2-deoxy-beta-D-galactopyra nosyl]oxy]-14,14-bis[[3-[[3-[[5-[[2-(acetylamino)-2-deoxy-b eta-D-galactopyranosyl]oxy]-1-oxopentyl]amino]propyl]amino] -3-oxopropoxy]methyl]-1,12,19,25-tetraoxo-16-oxa-13,20,24-t riazanonacos-1-yl]-4-hydroxy-2-pyrrolidinyl)methyl ester
acttgggcaaaggtggaaatt

SEQ ID NO: 1140 - RNA, 21 nt, synthetic construct
  source 1..21: mol_type = other RNA
  modified_base 1: mod_base = OTHER; note = 2'-O-methylcytidine-3'-phosphorothioate
  modified_base 2: mod_base = OTHER; note = 2'-O-methyluridine-3'-phosphorothioate
  modified_base 3: mod_base = OTHER; note = 2'-O-methyluridine-3'-phosphate
  modified_base 4: mod_base = OTHER; note = 2'-O-methylguanosine-3'-phosphate
  modified_base 5: mod_base = OTHER; note = 2'-O-methylguanosine-3'-phosphate
  modified_base 6: mod_base = OTHER; note = 2'-O-hexadecyl-guanosine-3'-phosphate
  modified_base 7: mod_base = OTHER; note = 2'-deoxy-2'-fluorocytidine-3'-phosphate
  modified_base 8: mod_base = OTHER; note = 2'-O-methyladenosine-3'-phosphate
  modified_base 9: mod_base = OTHER; note = 2'-deoxy-2'-fluoroadenosine-3'-phosphate
  modified_base 10: mod_base = OTHER; note = 2'-deoxy-2'-fluoroadenosine-3'-phosphate
  modified_base 11: mod_base = OTHER; note = 2'-deoxy-2'-fluoroguanosine-3'-phosphate
  modified_base 12: mod_base = OTHER; note = 2'-O-methylguanosine-3'-phosphate
  modified_base 13: mod_base = OTHER; note = 2'-O-methyluridine-3'-phosphate
  modified_base 14: mod_base = OTHER; note = 2'-O-methylguanosine-3'-phosphate
  modified_base 15: mod_base = OTHER; note = 2'-O-methylguanosine-3'-phosphate
  modified_base 16: mod_base = OTHER; note = 2'-O-methyladenosine-3'-phosphate
  modified_base 17: mod_base = OTHER; note = 2'-O-methyladenosine-3'-phosphate
  modified_base 18: mod_base = OTHER; note = 2'-O-methyladenosine-3'-phosphate
  modified_base 19: mod_base = OTHER; note = 2'-O-methyluridine-3'-phosphate
  modified_base 20: mod_base = OTHER; note = 2'-O-methylguanosine-3'-phosphate
  modified_base 21: mod_base = OTHER; note = 2'-O-methyladenosine-3'-phosphate ((2S,4R)-1-[29-[[2-(acetylamino)-2-deoxy-beta-D-galactopyra nosyl]oxy]-14,14-bis[[3-[[3-[[5-[[2-(acetylamino)-2-deoxy-b eta-D-galactopyranosyl]oxy]-1-oxopentyl]amino]propyl]amino] -3-oxopropoxy]methyl]-1,12,19,25-tetraoxo-16-oxa-13,20,24-t riazanonacos-1-yl]-4-hydroxy-2-pyrrolidinyl)methyl ester
cttgggcaaaggtggaaatga

SEQ ID NO: 1141 - RNA, 21 nt, synthetic construct
  source 1..21: mol_type = other RNA
  modified_base 1: mod_base = OTHER; note = 2'-O-methyluridine-3'-phosphorothioate
  modified_base 2: mod_base = OTHER; note = 2'-O-methyluridine-3'-phosphorothioate
  modified_base 3: mod_base = OTHER; note = 2'-O-methylguanosine-3'-phosphate
  modified_base 4: mod_base = OTHER; note = 2'-O-methylguanosine-3'-phosphate
  modified_base 5: mod_base = OTHER; note = 2'-O-methylguanosine-3'-phosphate
  modified_base 6: mod_base = OTHER; note = 2'-O-hexadecyl-cytidine-3'-phosphate
  modified_base 7: mod_base = OTHER; note = 2'-deoxy-2'-fluoroadenosine-3'-phosphate
  modified_base 8: mod_base = OTHER; note = 2'-O-methyladenosine-3'-phosphate
  modified_base 9: mod_base = OTHER; note = 2'-deoxy-2'-fluoroadenosine-3'-phosphate
  modified_base 10: mod_base = OTHER; note = 2'-deoxy-2'-fluoroguanosine-3'-phosphate
  modified_base 11: mod_base = OTHER; note = 2'-deoxy-2'-fluoroguanosine-3'-phosphate
  modified_base 12: mod_base = OTHER; note = 2'-O-methyluridine-3'-phosphate
  modified_base 13: mod_base = OTHER; note = 2'-O-methylguanosine-3'-phosphate
  modified_base 14: mod_base = OTHER; note = 2'-O-methylguanosine-3'-phosphate
  modified_base 15: mod_base = OTHER; note = 2'-O-methyladenosine-3'-phosphate
  modified_base 16: mod_base = OTHER; note = 2'-O-methyladenosine-3'-phosphate
  modified_base 17: mod_base = OTHER; note = 2'-O-methyladenosine-3'-phosphate
  modified_base 18: mod_base = OTHER; note = 2'-O-methyluridine-3'-phosphate
  modified_base 19: mod_base = OTHER; note = 2'-O-methylguanosine-3'-phosphate
  modified_base 20: mod_base = OTHER; note = 2'-O-methyladenosine-3'-phosphate
  modified_base 21: mod_base = OTHER; note = 2'-O-methyladenosine-3'-phosphate ((2S,4R)-1-[29-[[2-(acetylamino)-2-deoxy-beta-D-galactopyra nosyl]oxy]-14,14-bis[[3-[[3-[[5-[[2-(acetylamino)-2-deoxy-b eta-D-galactopyranosyl]oxy]-1-oxopentyl]amino]propyl]amino] -3-oxopropoxy]methyl]-1,12,19,25-tetraoxo-16-oxa-13,20,24-t riazanonacos-1-yl]-4-hydroxy-2-pyrrolidinyl)methyl ester
ttgggcaaaggtggaaatgaa

SEQ ID NO: 1142 - RNA, 21 nt, synthetic construct
  source 1..21: mol_type = other RNA
  modified_base 1: mod_base = OTHER; note = 2'-O-methyluridine-3'-phosphorothioate
  modified_base 2: mod_base = OTHER; note = 2'-O-methylguanosine-3'-phosphorothioate
  modified_base 3: mod_base = OTHER; note = 2'-O-methylguanosine-3'-phosphate
  modified_base 4: mod_base = OTHER; note = 2'-O-methylguanosine-3'-phosphate
  modified_base 5: mod_base = OTHER; note = 2'-O-methylcytidine-3'-phosphate
  modified_base 6: mod_base = OTHER; note = 2'-O-hexadecyl-adenosine-3'-phosphate
  modified_base 7: mod_base = OTHER; note = 2'-deoxy-2'-fluoroadenosine-3'-phosphate
  modified_base 8: mod_base = OTHER; note = 2'-O-methyladenosine-3'-phosphate
  modified_base 9: mod_base = OTHER; note = 2'-deoxy-2'-fluoroguanosine-3'-phosphate
  modified_base 10: mod_base = OTHER; note = 2'-deoxy-2'-fluoroguanosine-3'-phosphate
  modified_base 11: mod_base = OTHER; note = 2'-deoxy-2'-fluorouridine-3'-phosphate
  modified_base 12: mod_base = OTHER; note = 2'-O-methylguanosine-3'-phosphate
  modified_base 13: mod_base = OTHER; note = 2'-O-methylguanosine-3'-phosphate
  modified_base 14: mod_base = OTHER; note = 2'-O-methyladenosine-3'-phosphate
  modified_base 15: mod_base = OTHER; note = 2'-O-methyladenosine-3'-phosphate
  modified_base 16: mod_base = OTHER; note = 2'-O-methyladenosine-3'-phosphate
  modified_base 17: mod_base = OTHER; note = 2'-O-methyluridine-3'-phosphate
  modified_base 18: mod_base = OTHER; note = 2'-O-methylguanosine-3'-phosphate
  modified_base 19: mod_base = OTHER; note = 2'-O-methyladenosine-3'-phosphate
  modified_base 20: mod_base = OTHER; note = 2'-O-methyladenosine-3'-phosphate
  modified_base 21: mod_base = OTHER; note = 2'-O-methyluridine-3'-phosphate ((2S,4R)-1-[29-[[2-(acetylamino)-2-deoxy-beta-D-galactopyra nosyl]oxy]-14,14-bis[[3-[[3-[[5-[[2-(acetylamino)-2-deoxy-b eta-D-galactopyranosyl]oxy]-1-oxopentyl]amino]propyl]amino] -3-oxopropoxy]methyl]-1,12,19,25-tetraoxo-16-oxa-13,20,24-t riazanonacos-1-yl]-4-hydroxy-2-pyrrolidinyl)methyl ester
tgggcaaaggtggaaatgaat

SEQ ID NO: 1143 - RNA, 21 nt, synthetic construct
  source 1..21: mol_type = other RNA
  modified_base 1: mod_base = OTHER; note = 2'-O-methylguanosine-3'-phosphorothioate
  modified_base 2: mod_base = OTHER; note = 2'-O-methylguanosine-3'-phosphorothioate
  modified_base 3: mod_base = OTHER; note = 2'-O-methylguanosine-3'-phosphate
  modified_base 4: mod_base = OTHER; note = 2'-O-methylcytidine-3'-phosphate
  modified_base 5: mod_base = OTHER; note = 2'-O-methyladenosine-3'-phosphate
  modified_base 6: mod_base = OTHER; note = 2'-O-hexadecyl-adenosine-3'-phosphate
  modified_base 7: mod_base = OTHER; note = 2'-deoxy-2'-fluoroadenosine-3'-phosphate
  modified_base 8: mod_base = OTHER; note = 2'-O-methylguanosine-3'-phosphate
  modified_base 9: mod_base = OTHER; note = 2'-deoxy-2'-fluoroguanosine-3'-phosphate
  modified_base 10: mod_base = OTHER; note = 2'-deoxy-2'-fluorouridine-3'-phosphate
  modified_base 11: mod_base = OTHER; note = 2'-deoxy-2'-fluoroguanosine-3'-phosphate
  modified_base 12: mod_base = OTHER; note = 2'-O-methylguanosine-3'-phosphate
  modified_base 13: mod_base = OTHER; note = 2'-O-methyladenosine-3'-phosphate
  modified_base 14: mod_base = OTHER; note = 2'-O-methyladenosine-3'-phosphate
  modified_base 15: mod_base = OTHER; note = 2'-O-methyladenosine-3'-phosphate
  modified_base 16: mod_base = OTHER; note = 2'-O-methyluridine-3'-phosphate
  modified_base 17: mod_base = OTHER; note = 2'-O-methylguanosine-3'-phosphate
  modified_base 18: mod_base = OTHER; note = 2'-O-methyladenosine-3'-phosphate
  modified_base 19: mod_base = OTHER; note = 2'-O-methyladenosine-3'-phosphate
  modified_base 20: mod_base = OTHER; note = 2'-O-methylguanosine-3'-phosphate
  modified_base 21: mod_base = OTHER; note = 2'-O-methyladenosine-3'-phosphate ((2S,4R)-1-[29-[[2-(acetylamino)-2-deoxy-beta-D-galactopyra nosyl]oxy]-14,14-bis[[3-[[3-[[5-[[2-(acetylamino)-2-deoxy-b eta-D-galactopyranosyl]oxy]-1-oxopentyl]amino]propyl]amino] -3-oxopropoxy]methyl]-1,12,19,25-tetraoxo-16-oxa-13,20,24-t riazanonacos-1-yl]-4-hydroxy-2-pyrrolidinyl)methyl ester
gggcaaaggtggaaatgaaga

SEQ ID NO: 1144 - RNA, 21 nt, synthetic construct
  source 1..21: mol_type = other RNA
  modified_base 1: mod_base = OTHER; note = 2'-O-methylguanosine-3'-phosphorothioate
  modified_base 2: mod_base = OTHER; note = 2'-O-methylguanosine-3'-phosphorothioate
  modified_base 3: mod_base = OTHER; note = 2'-O-methylcytidine-3'-phosphate
  modified_base 4: mod_base = OTHER; note = 2'-O-methyladenosine-3'-phosphate
  modified_base 5: mod_base = OTHER; note = 2'-O-methyladenosine-3'-phosphate
  modified_base 6: mod_base = OTHER; note = 2'-O-hexadecyl-adenosine-3'-phosphate
  modified_base 7: mod_base = OTHER; note = 2'-deoxy-2'-fluoroguanosine-3'-phosphate
  modified_base 8: mod_base = OTHER; note = 2'-O-methylguanosine-3'-phosphate
  modified_base 9: mod_base = OTHER; note = 2'-deoxy-2'-fluorouridine-3'-phosphate
  modified_base 10: mod_base = OTHER; note = 2'-deoxy-2'-fluoroguanosine-3'-phosphate
  modified_base 11: mod_base = OTHER; note = 2'-deoxy-2'-fluoroguanosine-3'-phosphate
  modified_base 12: mod_base = OTHER; note = 2'-O-methyladenosine-3'-phosphate
  modified_base 13: mod_base = OTHER; note = 2'-O-methyladenosine-3'-phosphate
  modified_base 14: mod_base = OTHER; note = 2'-O-methyladenosine-3'-phosphate
  modified_base 15: mod_base = OTHER; note = 2'-O-methyluridine-3'-phosphate
  modified_base 16: mod_base = OTHER; note = 2'-O-methylguanosine-3'-phosphate
  modified_base 17: mod_base = OTHER; note = 2'-O-methyladenosine-3'-phosphate
  modified_base 18: mod_base = OTHER; note = 2'-O-methyladenosine-3'-phosphate
  modified_base 19: mod_base = OTHER; note = 2'-O-methylguanosine-3'-phosphate
  modified_base 20: mod_base = OTHER; note = 2'-O-methyladenosine-3'-phosphate
  modified_base 21: mod_base = OTHER; note = 2'-O-methyladenosine-3'-phosphate ((2S,4R)-1-[29-[[2-(acetylamino)-2-deoxy-beta-D-galactopyra nosyl]oxy]-14,14-bis[[3-[[3-[[5-[[2-(acetylamino)-2-deoxy-b eta-D-galactopyranosyl]oxy]-1-oxopentyl]amino]propyl]amino] -3-oxopropoxy]methyl]-1,12,19,25-tetraoxo-16-oxa-13,20,24-t riazanonacos-1-yl]-4-hydroxy-2-pyrrolidinyl)methyl ester
ggcaaaggtggaaatgaagaa

SEQ ID NO: 1145 - RNA, 21 nt, synthetic construct
  source 1..21: mol_type = other RNA
  modified_base 1: mod_base = OTHER; note = 2'-O-methylguanosine-3'-phosphorothioate
  modified_base 2: mod_base = OTHER; note = 2'-O-methylcytidine-3'-phosphorothioate
  modified_base 3: mod_base = OTHER; note = 2'-O-methyladenosine-3'-phosphate
  modified_base 4: mod_base = OTHER; note = 2'-O-methyladenosine-3'-phosphate
  modified_base 5: mod_base = OTHER; note = 2'-O-methyladenosine-3'-phosphate
  modified_base 6: mod_base = OTHER; note = 2'-O-hexadecyl-guanosine-3'-phosphate
  modified_base 7: mod_base = OTHER; note = 2'-deoxy-2'-fluoroguanosine-3'-phosphate
  modified_base 8: mod_base = OTHER; note = 2'-O-methyluridine-3'-phosphate
  modified_base 9: mod_base = OTHER; note = 2'-deoxy-2'-fluoroguanosine-3'-phosphate
  modified_base 10: mod_base = OTHER; note = 2'-deoxy-2'-fluoroguanosine-3'-phosphate
  modified_base 11: mod_base = OTHER; note = 2'-deoxy-2'-fluoroadenosine-3'-phosphate
  modified_base 12: mod_base = OTHER; note = 2'-O-methyladenosine-3'-phosphate
  modified_base 13: mod_base = OTHER; note = 2'-O-methyladenosine-3'-phosphate
  modified_base 14: mod_base = OTHER; note = 2'-O-methyluridine-3'-phosphate
  modified_base 15: mod_base = OTHER; note = 2'-O-methylguanosine-3'-phosphate
  modified_base 16: mod_base = OTHER; note = 2'-O-methyladenosine-3'-phosphate
  modified_base 17: mod_base = OTHER; note = 2'-O-methyladenosine-3'-phosphate
  modified_base 18: mod_base = OTHER; note = 2'-O-methylguanosine-3'-phosphate
  modified_base 19: mod_base = OTHER; note = 2'-O-methyladenosine-3'-phosphate
  modified_base 20: mod_base = OTHER; note = 2'-O-methyladenosine-3'-phosphate
  modified_base 21: mod_base = OTHER; note = 2'-O-methyladenosine-3'-phosphate ((2S,4R)-1-[29-[[2-(acetylamino)-2-deoxy-beta-D-galactopyra nosyl]oxy]-14,14-bis[[3-[[3-[[5-[[2-(acetylamino)-2-deoxy-b eta-D-galactopyranosyl]oxy]-1-oxopentyl]amino]propyl]amino] -3-oxopropoxy]methyl]-1,12,19,25-tetraoxo-16-oxa-13,20,24-t riazanonacos-1-yl]-4-hydroxy-2-pyrrolidinyl)methyl ester
gcaaaggtggaaatgaagaaa

SEQ ID NO: 1146 - RNA, 21 nt, synthetic construct
  source 1..21: mol_type = other RNA
  modified_base 1: mod_base = OTHER; note = 2'-O-methylcytidine-3'-phosphorothioate
  modified_base 2: mod_base = OTHER; note = 2'-O-methyladenosine-3'-phosphorothioate
  modified_base 3: mod_base = OTHER; note = 2'-O-methyladenosine-3'-phosphate
  modified_base 4: mod_base = OTHER; note = 2'-O-methyladenosine-3'-phosphate
  modified_base 5: mod_base = OTHER; note = 2'-O-methylguanosine-3'-phosphate
  modified_base 6: mod_base = OTHER; note = 2'-O-hexadecyl-guanosine-3'-phosphate
  modified_base 7: mod_base = OTHER; note = 2'-deoxy-2'-fluorouridine-3'-phosphate
  modified_base 8: mod_base = OTHER; note = 2'-O-methylguanosine-3'-phosphate
  modified_base 9: mod_base = OTHER; note = 2'-deoxy-2'-fluoroguanosine-3'-phosphate
  modified_base 10: mod_base = OTHER; note = 2'-deoxy-2'-fluoroadenosine-3'-phosphate
  modified_base 11: mod_base = OTHER; note = 2'-deoxy-2'-fluoroadenosine-3'-phosphate
  modified_base 12: mod_base = OTHER; note = 2'-O-methyladenosine-3'-phosphate
  modified_base 13: mod_base = OTHER; note = 2'-O-methyluridine-3'-phosphate
  modified_base 14: mod_base = OTHER; note = 2'-O-methylguanosine-3'-phosphate
  modified_base 15: mod_base = OTHER; note = 2'-O-methyladenosine-3'-phosphate
  modified_base 16: mod_base = OTHER; note = 2'-O-methyladenosine-3'-phosphate
  modified_base 17: mod_base = OTHER; note = 2'-O-methylguanosine-3'-phosphate
  modified_base 18: mod_base = OTHER; note = 2'-O-methyladenosine-3'-phosphate
  modified_base 19: mod_base = OTHER; note = 2'-O-methyladenosine-3'-phosphate
  modified_base 20: mod_base = OTHER; note = 2'-O-methyladenosine-3'-phosphate
  modified_base 21: mod_base = OTHER; note = 2'-O-methyluridine-3'-phosphate ((2S,4R)-1-[29-[[2-(acetylamino)-2-deoxy-beta-D-galactopyra nosyl]oxy]-14,14-bis[[3-[[3-[[5-[[2-(acetylamino)-2-deoxy-b eta-D-galactopyranosyl]oxy]-1-oxopentyl]amino]propyl]amino] -3-oxopropoxy]methyl]-1,12,19,25-tetraoxo-16-oxa-13,20,24-t riazanonacos-1-yl]-4-hydroxy-2-pyrrolidinyl)methyl ester
caaaggtggaaatgaagaaat

SEQ ID NO: 1147 - RNA, 21 nt, synthetic construct
  source 1..21: mol_type = other RNA
  modified_base 1: mod_base = OTHER; note = 2'-O-methyladenosine-3'-phosphorothioate
  modified_base 2: mod_base = OTHER; note = 2'-O-methyladenosine-3'-phosphorothioate
  modified_base 3: mod_base = OTHER; note = 2'-O-methyladenosine-3'-phosphate
  modified_base 4: mod_base = OTHER; note = 2'-O-methylguanosine-3'-phosphate
  modified_base 5: mod_base = OTHER; note = 2'-O-methylguanosine-3'-phosphate
  modified_base 6: mod_base = OTHER; note = 2'-O-hexadecyl-uridine-3'-phosphate
  modified_base 7: mod_base = OTHER; note = 2'-deoxy-2'-fluoroguanosine-3'-phosphate
  modified_base 8: mod_base = OTHER; note = 2'-O-methylguanosine-3'-phosphate
  modified_base 9: mod_base = OTHER; note = 2'-deoxy-2'-fluoroadenosine-3'-phosphate
  modified_base 10: mod_base = OTHER; note = 2'-deoxy-2'-fluoroadenosine-3'-phosphate
  modified_base 11: mod_base = OTHER; note = 2'-deoxy-2'-fluoroadenosine-3'-phosphate
  modified_base 12: mod_base = OTHER; note = 2'-O-methyluridine-3'-phosphate
  modified_base 13: mod_base = OTHER; note = 2'-O-methylguanosine-3'-phosphate
  modified_base 14: mod_base = OTHER; note = 2'-O-methyladenosine-3'-phosphate
  modified_base 15: mod_base = OTHER; note = 2'-O-methyladenosine-3'-phosphate
  modified_base 16: mod_base = OTHER; note = 2'-O-methylguanosine-3'-phosphate
  modified_base 17: mod_base = OTHER; note = 2'-O-methyladenosine-3'-phosphate
  modified_base 18: mod_base = OTHER; note = 2'-O-methyladenosine-3'-phosphate
  modified_base 19: mod_base = OTHER; note = 2'-O-methyladenosine-3'-phosphate
  modified_base 20: mod_base = OTHER; note = 2'-O-methylguanosine-3'-phosphate
  modified_base 21: mod_base = OTHER; note = 2'-O-methyluridine-3'-phosphate ((2S,4R)-1-[29-[[2-(acetylamino)-2-deoxy-beta-D-galactopyra nosyl]oxy]-14,14-bis[[3-[[3-[[5-[[2-(acetylamino)-2-deoxy-b eta-D-galactopyranosyl]oxy]-1-oxopentyl]amino]propyl]amino] -3-oxopropoxy]methyl]-1,12,19,25-tetraoxo-16-oxa-13,20,24-t riazanonacos-1-yl]-4-hydroxy-2-pyrrolidinyl)methyl ester
aaaggtggaaatgaagaaagt

SEQ ID NO: 1148 - RNA, 21 nt, synthetic construct
  source 1..21: mol_type = other RNA
  modified_base 1: mod_base = OTHER; note = 2'-O-methyladenosine-3'-phosphorothioate
  modified_base 2: mod_base = OTHER; note = 2'-O-methyladenosine-3'-phosphorothioate
  modified_base 3: mod_base = OTHER; note = 2'-O-methylguanosine-3'-phosphate
  modified_base 4: mod_base = OTHER; note = 2'-O-methylguanosine-3'-phosphate
  modified_base 5: mod_base = OTHER; note = 2'-O-methyluridine-3'-phosphate
  modified_base 6: mod_base = OTHER; note = 2'-O-hexadecyl-guanosine-3'-phosphate
  modified_base 7: mod_base = OTHER; note = 2'-deoxy-2'-fluoroguanosine-3'-phosphate
  modified_base 8: mod_base = OTHER; note = 2'-O-methyladenosine-3'-phosphate
  modified_base 9: mod_base = OTHER; note = 2'-deoxy-2'-fluoroadenosine-3'-phosphate
  modified_base 10: mod_base = OTHER; note = 2'-deoxy-2'-fluoroadenosine-3'-phosphate
  modified_base 11: mod_base = OTHER; note = 2'-deoxy-2'-fluorouridine-3'-phosphate
  modified_base 12: mod_base = OTHER; note = 2'-O-methylguanosine-3'-phosphate
  modified_base 13: mod_base = OTHER; note = 2'-O-methyladenosine-3'-phosphate
  modified_base 14: mod_base = OTHER; note = 2'-O-methyladenosine-3'-phosphate
  modified_base 15: mod_base = OTHER; note = 2'-O-methylguanosine-3'-phosphate
  modified_base 16: mod_base = OTHER; note = 2'-O-methyladenosine-3'-phosphate
  modified_base 17: mod_base = OTHER; note = 2'-O-methyladenosine-3'-phosphate
  modified_base 18: mod_base = OTHER; note = 2'-O-methyladenosine-3'-phosphate
  modified_base 19: mod_base = OTHER; note = 2'-O-methylguanosine-3'-phosphate
  modified_base 20: mod_base = OTHER; note = 2'-O-methyluridine-3'-phosphate
  modified_base 21: mod_base = OTHER; note = 2'-O-methyladenosine-3'-phosphate ((2S,4R)-1-[29-[[2-(acetylamino)-2-deoxy-beta-D-galactopyra nosyl]oxy]-14,14-bis[[3-[[3-[[5-[[2-(acetylamino)-2-deoxy-b eta-D-galactopyranosyl]oxy]-1-oxopentyl]amino]propyl]amino] -3-oxopropoxy]methyl]-1,12,19,25-tetraoxo-16-oxa-13,20,24-t riazanonacos-1-yl]-4-hydroxy-2-pyrrolidinyl)methyl ester
aaggtggaaatgaagaaagta

SEQ ID NO: 1149 - RNA, 21 nt, synthetic construct
  source 1..21: mol_type = other RNA
  modified_base 1: mod_base = OTHER; note = 2'-O-methyladenosine-3'-phosphorothioate
  modified_base 2: mod_base = OTHER; note = 2'-O-methylguanosine-3'-phosphorothioate
  modified_base 3: mod_base = OTHER; note = 2'-O-methylguanosine-3'-phosphate
  modified_base 4: mod_base = OTHER; note = 2'-O-methyluridine-3'-phosphate
  modified_base 5: mod_base = OTHER; note = 2'-O-methylguanosine-3'-phosphate
  modified_base 6: mod_base = OTHER; note = 2'-O-hexadecyl-guanosine-3'-phosphate
  modified_base 7: mod_base = OTHER; note = 2'-deoxy-2'-fluoroadenosine-3'-phosphate
  modified_base 8: mod_base = OTHER; note = 2'-O-methyladenosine-3'-phosphate
  modified_base 9: mod_base = OTHER; note = 2'-deoxy-2'-fluoroadenosine-3'-phosphate
  modified_base 10: mod_base = OTHER; note = 2'-deoxy-2'-fluorouridine-3'-phosphate
  modified_base 11: mod_base = OTHER; note = 2'-deoxy-2'-fluoroguanosine-3'-phosphate
  modified_base 12: mod_base = OTHER; note = 2'-O-methyladenosine-3'-phosphate
  modified_base 13: mod_base = OTHER; note = 2'-O-methyladenosine-3'-phosphate
  modified_base 14: mod_base = OTHER; note = 2'-O-methylguanosine-3'-phosphate
  modified_base 15: mod_base = OTHER; note = 2'-O-methyladenosine-3'-phosphate
  modified_base 16: mod_base = OTHER; note = 2'-O-methyladenosine-3'-phosphate
  modified_base 17: mod_base = OTHER; note = 2'-O-methyladenosine-3'-phosphate
  modified_base 18: mod_base = OTHER; note = 2'-O-methylguanosine-3'-phosphate
  modified_base 19: mod_base = OTHER; note = 2'-O-methyluridine-3'-phosphate
  modified_base 20: mod_base = OTHER; note = 2'-O-methyladenosine-3'-phosphate
  modified_base 21: mod_base = OTHER; note = 2'-O-methyluridine-3'-phosphate ((2S,4R)-1-[29-[[2-(acetylamino)-2-deoxy-beta-D-galactopyra nosyl]oxy]-14,14-bis[[3-[[3-[[5-[[2-(acetylamino)-2-deoxy-b eta-D-galactopyranosyl]oxy]-1-oxopentyl]amino]propyl]amino] -3-oxopropoxy]methyl]-1,12,19,25-tetraoxo-16-oxa-13,20,24-t riazanonacos-1-yl]-4-hydroxy-2-pyrrolidinyl)methyl ester
aggtggaaatgaagaaagtat

SEQ ID NO: 1150 - RNA, 21 nt, synthetic construct
  source 1..21: mol_type = other RNA
  modified_base 1: mod_base = OTHER; note = 2'-O-methylguanosine-3'-phosphorothioate
  modified_base 2: mod_base = OTHER; note = 2'-O-methylguanosine-3'-phosphorothioate
  modified_base 3: mod_base = OTHER; note = 2'-O-methyluridine-3'-phosphate
  modified_base 4: mod_base = OTHER; note = 2'-O-methylguanosine-3'-phosphate
  modified_base 5: mod_base = OTHER; note = 2'-O-methylguanosine-3'-phosphate
  modified_base 6: mod_base = OTHER; note = 2'-O-hexadecyl-adenosine-3'-phosphate
  modified_base 7: mod_base = OTHER; note = 2'-deoxy-2'-fluoroadenosine-3'-phosphate
  modified_base 8: mod_base = OTHER; note = 2'-O-methyladenosine-3'-phosphate
  modified_base 9: mod_base = OTHER; note = 2'-deoxy-2'-fluorouridine-3'-phosphate
  modified_base 10: mod_base = OTHER; note = 2'-deoxy-2'-fluoroguanosine-3'-phosphate
  modified_base 11: mod_base = OTHER; note = 2'-deoxy-2'-fluoroadenosine-3'-phosphate
  modified_base 12: mod_base = OTHER; note = 2'-O-methyladenosine-3'-phosphate
  modified_base 13: mod_base = OTHER; note = 2'-O-methylguanosine-3'-phosphate
  modified_base 14: mod_base = OTHER; note = 2'-O-methyladenosine-3'-phosphate
  modified_base 15: mod_base = OTHER; note = 2'-O-methyladenosine-3'-phosphate
  modified_base 16: mod_base = OTHER; note = 2'-O-methyladenosine-3'-phosphate
  modified_base 17: mod_base = OTHER; note = 2'-O-methylguanosine-3'-phosphate
  modified_base 18: mod_base = OTHER; note = 2'-O-methyluridine-3'-phosphate
  modified_base 19: mod_base = OTHER; note = 2'-O-methyladenosine-3'-phosphate
  modified_base 20: mod_base = OTHER; note = 2'-O-methylcytidine-3'-phosphate
  modified_base 21: mod_base = OTHER; note = 2'-O-methyladenosine-3'-phosphate ((2S,4R)-1-[29-[[2-(acetylamino)-2-deoxy-beta-D-galactopyra nosyl]oxy]-14,14-bis[[3-[[3-[[5-[[2-(acetylamino)-2-deoxy-b eta-D-galactopyranosyl]oxy]-1-oxopentyl]amino]propyl]amino] -3-oxopropoxy]methyl]-1,12,19,25-tetraoxo-16-oxa-13,20,24-t riazanonacos-1-yl]-4-hydroxy-2-pyrrolidinyl)methyl ester
ggtggaaatgaagaaagtaca

SEQ ID NO: 1151 - RNA, 21 nt, synthetic construct
  source 1..21: mol_type = other RNA
  modified_base 1: mod_base = OTHER; note = 2'-O-methylguanosine-3'-phosphorothioate
  modified_base 2: mod_base = OTHER; note = 2'-O-methyluridine-3'-phosphorothioate
  modified_base 3: mod_base = OTHER; note = 2'-O-methylguanosine-3'-phosphate
  modified_base 4: mod_base = OTHER; note = 2'-O-methylguanosine-3'-phosphate
  modified_base 5: mod_base = OTHER; note = 2'-O-methyladenosine-3'-phosphate
  modified_base 6: mod_base = OTHER; note = 2'-O-hexadecyl-adenosine-3'-phosphate
  modified_base 7: mod_base = OTHER; note = 2'-deoxy-2'-fluoroadenosine-3'-phosphate
  modified_base 8: mod_base = OTHER; note = 2'-O-methyluridine-3'-phosphate
  modified_base 9: mod_base = OTHER; note = 2'-deoxy-2'-fluoroguanosine-3'-phosphate
  modified_base 10: mod_base = OTHER; note = 2'-deoxy-2'-fluoroadenosine-3'-phosphate
  modified_base 11: mod_base = OTHER; note = 2'-deoxy-2'-fluoroadenosine-3'-phosphate
  modified_base 12: mod_base = OTHER; note = 2'-O-methylguanosine-3'-phosphate
  modified_base 13: mod_base = OTHER; note = 2'-O-methyladenosine-3'-phosphate
  modified_base 14: mod_base = OTHER; note = 2'-O-methyladenosine-3'-phosphate
  modified_base 15: mod_base = OTHER; note = 2'-O-methyladenosine-3'-phosphate
  modified_base 16: mod_base = OTHER; note = 2'-O-methylguanosine-3'-phosphate
  modified_base 17: mod_base = OTHER; note = 2'-O-methyluridine-3'-phosphate
  modified_base 18: mod_base = OTHER; note = 2'-O-methyladenosine-3'-phosphate
  modified_base 19: mod_base = OTHER; note = 2'-O-methylcytidine-3'-phosphate
  modified_base 20: mod_base = OTHER; note = 2'-O-methyladenosine-3'-phosphate
  modified_base 21: mod_base = OTHER; note = 2'-O-methyladenosine-3'-phosphate ((2S,4R)-1-[29-[[2-(acetylamino)-2-deoxy-beta-D-galactopyra nosyl]oxy]-14,14-bis[[3-[[3-[[5-[[2-(acetylamino)-2-deoxy-b eta-D-galactopyranosyl]oxy]-1-oxopentyl]amino]propyl]amino] -3-oxopropoxy]methyl]-1,12,19,25-tetraoxo-16-oxa-13,20,24-t riazanonacos-1-yl]-4-hydroxy-2-pyrrolidinyl)methyl ester
gtggaaatgaagaaagtacaa

SEQ ID NO: 1152 - RNA, 21 nt, synthetic construct
  source 1..21: mol_type = other RNA
  modified_base 1: mod_base = OTHER; note = 2'-O-methyluridine-3'-phosphorothioate
  modified_base 2: mod_base = OTHER; note = 2'-O-methylguanosine-3'-phosphorothioate
  modified_base 3: mod_base = OTHER; note = 2'-O-methylguanosine-3'-phosphate
  modified_base 4: mod_base = OTHER; note = 2'-O-methyladenosine-3'-phosphate
  modified_base 5: mod_base = OTHER; note = 2'-O-methyladenosine-3'-phosphate
  modified_base 6: mod_base = OTHER; note = 2'-O-hexadecyl-adenosine-3'-phosphate
  modified_base 7: mod_base = OTHER; note = 2'-deoxy-2'-fluorouridine-3'-phosphate
  modified_base 8: mod_base = OTHER; note = 2'-O-methylguanosine-3'-phosphate
  modified_base 9: mod_base = OTHER; note = 2'-deoxy-2'-fluoroadenosine-3'-phosphate
  modified_base 10: mod_base = OTHER; note = 2'-deoxy-2'-fluoroadenosine-3'-phosphate
  modified_base 11: mod_base = OTHER; note = 2'-deoxy-2'-fluoroguanosine-3'-phosphate
  modified_base 12: mod_base = OTHER; note = 2'-O-methyladenosine-3'-phosphate
  modified_base 13: mod_base = OTHER; note = 2'-O-methyladenosine-3'-phosphate
  modified_base 14: mod_base = OTHER; note = 2'-O-methyladenosine-3'-phosphate
  modified_base 15: mod_base = OTHER; note = 2'-O-methylguanosine-3'-phosphate
  modified_base 16: mod_base = OTHER; note = 2'-O-methyluridine-3'-phosphate
  modified_base 17: mod_base = OTHER; note = 2'-O-methyladenosine-3'-phosphate
  modified_base 18: mod_base = OTHER; note = 2'-O-methylcytidine-3'-phosphate
  modified_base 19: mod_base = OTHER; note = 2'-O-methyladenosine-3'-phosphate
  modified_base 20: mod_base = OTHER; note = 2'-O-methyladenosine-3'-phosphate
  modified_base 21: mod_base = OTHER; note = 2'-O-methyladenosine-3'-phosphate ((2S,4R)-1-[29-[[2-(acetylamino)-2-deoxy-beta-D-galactopyra nosyl]oxy]-14,14-bis[[3-[[3-[[5-[[2-(acetylamino)-2-deoxy-b eta-D-galactopyranosyl]oxy]-1-oxopentyl]amino]propyl]amino] -3-oxopropoxy]methyl]-1,12,19,25-tetraoxo-16-oxa-13,20,24-t riazanonacos-1-yl]-4-hydroxy-2-pyrrolidinyl)methyl ester
tggaaatgaagaaagtacaaa

SEQ ID NO: 1153 - RNA, 21 nt, synthetic construct
  source 1..21: mol_type = other RNA
  modified_base 1: mod_base = OTHER; note = 2'-O-methylguanosine-3'-phosphorothioate
  modified_base 2: mod_base = OTHER; note = 2'-O-methylguanosine-3'-phosphorothioate
  modified_base 3: mod_base = OTHER; note = 2'-O-methyladenosine-3'-phosphate
  modified_base 4: mod_base = OTHER; note = 2'-O-methyladenosine-3'-phosphate
  modified_base 5: mod_base = OTHER; note = 2'-O-methyladenosine-3'-phosphate
  modified_base 6: mod_base = OTHER; note = 2'-O-hexadecyl-uridine-3'-phosphate
  modified_base 7: mod_base = OTHER; note = 2'-deoxy-2'-fluoroguanosine-3'-phosphate
  modified_base 8: mod_base = OTHER; note = 2'-O-methyladenosine-3'-phosphate
  modified_base 9: mod_base = OTHER; note = 2'-deoxy-2'-fluoroadenosine-3'-phosphate
  modified_base 10: mod_base = OTHER; note = 2'-deoxy-2'-fluoroguanosine-3'-phosphate
  modified_base 11: mod_base = OTHER; note = 2'-deoxy-2'-fluoroadenosine-3'-phosphate
  modified_base 12: mod_base = OTHER; note = 2'-O-methyladenosine-3'-phosphate
  modified_base 13: mod_base = OTHER; note = 2'-O-methyladenosine-3'-phosphate
  modified_base 14: mod_base = OTHER; note = 2'-O-methylguanosine-3'-phosphate
  modified_base 15: mod_base = OTHER; note = 2'-O-methyluridine-3'-phosphate
  modified_base 16: mod_base = OTHER; note = 2'-O-methyladenosine-3'-phosphate
  modified_base 17: mod_base = OTHER; note = 2'-O-methylcytidine-3'-phosphate
  modified_base 18: mod_base = OTHER; note = 2'-O-methyladenosine-3'-phosphate
  modified_base 19: mod_base = OTHER; note = 2'-O-methyladenosine-3'-phosphate
  modified_base 20: mod_base = OTHER; note = 2'-O-methyladenosine-3'-phosphate
  modified_base 21: mod_base = OTHER; note = 2'-O-methyluridine-3'-phosphate ((2S,4R)-1-[29-[[2-(acetylamino)-2-deoxy-beta-D-galactopyra nosyl]oxy]-14,14-bis[[3-[[3-[[5-[[2-(acetylamino)-2-deoxy-b eta-D-galactopyranosyl]oxy]-1-oxopentyl]amino]propyl]amino] -3-oxopropoxy]methyl]-1,12,19,25-tetraoxo-16-oxa-13,20,24-t riazanonacos-1-yl]-4-hydroxy-2-pyrrolidinyl)methyl ester
ggaaatgaagaaagtacaaat

SEQ ID NO: 1154 - RNA, 21 nt, synthetic construct
  source 1..21: mol_type = other RNA
  modified_base 1: mod_base = OTHER; note = 2'-O-methylguanosine-3'-phosphorothioate
  modified_base 2: mod_base = OTHER; note = 2'-O-methyladenosine-3'-phosphorothioate
  modified_base 3: mod_base = OTHER; note = 2'-O-methyladenosine-3'-phosphate
  modified_base 4: mod_base = OTHER; note = 2'-O-methyladenosine-3'-phosphate
  modified_base 5: mod_base = OTHER; note = 2'-O-methyluridine-3'-phosphate
  modified_base 6: mod_base = OTHER; note = 2'-O-hexadecyl-guanosine-3'-phosphate
  modified_base 7: mod_base = OTHER; note = 2'-deoxy-2'-fluoroadenosine-3'-phosphate
  modified_base 8: mod_base = OTHER; note = 2'-O-methyladenosine-3'-phosphate
  modified_base 9: mod_base = OTHER; note = 2'-deoxy-2'-fluoroguanosine-3'-phosphate
  modified_base 10: mod_base = OTHER; note = 2'-deoxy-2'-fluoroadenosine-3'-phosphate
  modified_base 11: mod_base = OTHER; note = 2'-deoxy-2'-fluoroadenosine-3'-phosphate
  modified_base 12: mod_base = OTHER; note = 2'-O-methyladenosine-3'-phosphate
  modified_base 13: mod_base = OTHER; note = 2'-O-methylguanosine-3'-phosphate
  modified_base 14: mod_base = OTHER; note = 2'-O-methyluridine-3'-phosphate
  modified_base 15: mod_base = OTHER; note = 2'-O-methyladenosine-3'-phosphate
  modified_base 16: mod_base = OTHER; note = 2'-O-methylcytidine-3'-phosphate
  modified_base 17: mod_base = OTHER; note = 2'-O-methyladenosine-3'-phosphate
  modified_base 18: mod_base = OTHER; note = 2'-O-methyladenosine-3'-phosphate
  modified_base 19: mod_base = OTHER; note = 2'-O-methyladenosine-3'-phosphate
  modified_base 20: mod_base = OTHER; note = 2'-O-methylguanosine-3'-phosphate
  modified_base 21: mod_base = OTHER; note = 2'-O-methyladenosine-3'-phosphate ((2S,4R)-1-[29-[[2-(acetylamino)-2-deoxy-beta-D-galactopyra nosyl]oxy]-14,14-bis[[3-[[3-[[5-[[2-(acetylamino)-2-deoxy-b eta-D-galactopyranosyl]oxy]-1-oxopentyl]amino]propyl]amino] -3-oxopropoxy]methyl]-1,12,19,25-tetraoxo-16-oxa-13,20,24-t riazanonacos-1-yl]-4-hydroxy-2-pyrrolidinyl)methyl ester
gaaatgaagaaagtacaaaga

SEQ ID NO: 1155 - RNA, 21 nt, synthetic construct
  source 1..21: mol_type = other RNA
  modified_base 1: mod_base = OTHER; note = 2'-O-methyladenosine-3'-phosphorothioate
  modified_base 2: mod_base = OTHER; note = 2'-O-methyladenosine-3'-phosphorothioate
  modified_base 3: mod_base = OTHER; note = 2'-O-methyladenosine-3'-phosphate
  modified_base 4: mod_base = OTHER; note = 2'-O-methyluridine-3'-phosphate
  modified_base 5: mod_base = OTHER; note = 2'-O-methylguanosine-3'-phosphate
  modified_base 6: mod_base = OTHER; note = 2'-O-hexadecyl-adenosine-3'-phosphate
  modified_base 7: mod_base = OTHER; note = 2'-deoxy-2'-fluoroadenosine-3'-phosphate
  modified_base 8: mod_base = OTHER; note = 2'-O-methylguanosine-3'-phosphate
  modified_base 9: mod_base = OTHER; note = 2'-deoxy-2'-fluoroadenosine-3'-phosphate
  modified_base 10: mod_base = OTHER; note = 2'-deoxy-2'-fluoroadenosine-3'-phosphate
  modified_base 11: mod_base = OTHER; note = 2'-deoxy-2'-fluoroadenosine-3'-phosphate
  modified_base 12: mod_base = OTHER; note = 2'-O-methylguanosine-3'-phosphate
  modified_base 13: mod_base = OTHER; note = 2'-O-methyluridine-3'-phosphate
  modified_base 14: mod_base = OTHER; note = 2'-O-methyladenosine-3'-phosphate
  modified_base 15: mod_base = OTHER; note = 2'-O-methylcytidine-3'-phosphate
  modified_base 16: mod_base = OTHER; note = 2'-O-methyladenosine-3'-phosphate
  modified_base 17: mod_base = OTHER; note = 2'-O-methyladenosine-3'-phosphate
  modified_base 18: mod_base = OTHER; note = 2'-O-methyladenosine-3'-phosphate
  modified_base 19: mod_base = OTHER; note = 2'-O-methylguanosine-3'-phosphate
  modified_base 20: mod_base = OTHER; note = 2'-O-methyladenosine-3'-phosphate
  modified_base 21: mod_base = OTHER; note = 2'-O-methyluridine-3'-phosphate ((2S,4R)-1-[29-[[2-(acetylamino)-2-deoxy-beta-D-galactopyra nosyl]oxy]-14,14-bis[[3-[[3-[[5-[[2-(acetylamino)-2-deoxy-b eta-D-galactopyranosyl]oxy]-1-oxopentyl]amino]propyl]amino] -3-oxopropoxy]methyl]-1,12,19,25-tetraoxo-16-oxa-13,20,24-t riazanonacos-1-yl]-4-hydroxy-2-pyrrolidinyl)methyl ester
aaatgaagaaagtacaaagat

SEQ ID NO: 1156 - RNA, 21 nt, synthetic construct
  source 1..21: mol_type = other RNA
  modified_base 1: mod_base = OTHER; note = 2'-O-methyladenosine-3'-phosphorothioate
  modified_base 2: mod_base = OTHER; note = 2'-O-methyladenosine-3'-phosphorothioate
  modified_base 3: mod_base = OTHER; note = 2'-O-methyluridine-3'-phosphate
  modified_base 4: mod_base = OTHER; note = 2'-O-methylguanosine-3'-phosphate
  modified_base 5: mod_base = OTHER; note = 2'-O-methyladenosine-3'-phosphate
  modified_base 6: mod_base = OTHER; note = 2'-O-hexadecyl-adenosine-3'-phosphate
  modified_base 7: mod_base = OTHER; note = 2'-deoxy-2'-fluoroguanosine-3'-phosphate
  modified_base 8: mod_base = OTHER; note = 2'-O-methyladenosine-3'-phosphate
  modified_base 9: mod_base = OTHER; note = 2'-deoxy-2'-fluoroadenosine-3'-phosphate
  modified_base 10: mod_base = OTHER; note = 2'-deoxy-2'-fluoroadenosine-3'-phosphate
  modified_base 11: mod_base = OTHER; note = 2'-deoxy-2'-fluoroguanosine-3'-phosphate
  modified_base 12: mod_base = OTHER; note = 2'-O-methyluridine-3'-phosphate
  modified_base 13: mod_base = OTHER; note = 2'-O-methyladenosine-3'-phosphate
  modified_base 14: mod_base = OTHER; note = 2'-O-methylcytidine-3'-phosphate
  modified_base 15: mod_base = OTHER; note = 2'-O-methyladenosine-3'-phosphate
  modified_base 16: mod_base = OTHER; note = 2'-O-methyladenosine-3'-phosphate
  modified_base 17: mod_base = OTHER; note = 2'-O-methyladenosine-3'-phosphate
  modified_base 18: mod_base = OTHER; note = 2'-O-methylguanosine-3'-phosphate
  modified_base 19: mod_base = OTHER; note = 2'-O-methyladenosine-3'-phosphate
  modified_base 20: mod_base = OTHER; note = 2'-O-methylcytidine-3'-phosphate
  modified_base 21: mod_base = OTHER; note = 2'-O-methyladenosine-3'-phosphate ((2S,4R)-1-[29-[[2-(acetylamino)-2-deoxy-beta-D-galactopyra nosyl]oxy]-14,14-bis[[3-[[3-[[5-[[2-(acetylamino)-2-deoxy-b eta-D-galactopyranosyl]oxy]-1-oxopentyl]amino]propyl]amino] -3-oxopropoxy]methyl]-1,12,19,25-tetraoxo-16-oxa-13,20,24-t riazanonacos-1-yl]-4-hydroxy-2-pyrrolidinyl)methyl ester
aatgaagaaagtacaaagaca

SEQ ID NO: 1157 - DNA, 23 bp, synthetic construct
  source 1..23: mol_type = other DNA
  modified_base 1: mod_base = OTHER; note = 2'-O-methyladenosine-3'-phosphorothioate
  modified_base 2: mod_base = OTHER; note = 2'-deoxy-2'-fluorocytidine-3'-phosphorothioate
  modified_base 3: mod_base = OTHER; note = 2'-O-methyluridine-3'-phosphate
  modified_base 4: mod_base = OTHER; note = 2'-O-methyluridine-3'-phosphate
  modified_base 6: mod_base = OTHER; note = 2'-O-methyluridine-3'-phosphate
  modified_base 7: mod_base = OTHER; note = guanosine-2'-phosphate
  modified_base 8: mod_base = OTHER; note = 2'-O-methylcytidine-3'-phosphate
  modified_base 9: mod_base = OTHER; note = 2'-O-methyluridine-3'-phosphate
  modified_base 10: mod_base = OTHER; note = 2'-O-methylcytidine-3'-phosphate
  modified_base 11: mod_base = OTHER; note = 2'-O-methylguanosine-3'-phosphate
  modified_base 12: mod_base = OTHER; note = 2'-O-methyladenosine-3'-phosphate
  modified_base 13: mod_base = OTHER; note = 2'-O-methyladenosine-3'-phosphate
  modified_base 14: mod_base = OTHER; note = 2'-deoxy-2'-fluoroadenosine-3'-phosphate
  modified_base 15: mod_base = OTHER; note = 2'-O-methyluridine-3'-phosphate
  modified_base 16: mod_base = OTHER; note = 2'-deoxy-2'-fluorouridine-3'-phosphate
  modified_base 17: mod_base = OTHER; note = 2'-O-methylguanosine-3'-phosphate
  modified_base 18: mod_base = OTHER; note = 2'-O-methyladenosine-3'-phosphate
  modified_base 19: mod_base = OTHER; note = 2'-O-methyluridine-3'-phosphate
  modified_base 20: mod_base = OTHER; note = 2'-O-methylguanosine-3'-phosphate
  modified_base 21: mod_base = OTHER; note = 2'-O-methyladenosine-3'-phosphorothioate
  modified_base 22: mod_base = OTHER; note = 2'-O-methyluridine-3'-phosphorothioate
  modified_base 23: mod_base = OTHER; note = 2'-O-methylguanosine
  misc_feature 1..4: note = RNA
  misc_feature 6..23: note = RNA
  misc_feature 5: note = DNA
acttctgctcgaaattgatgatg

SEQ ID NO: 1158 - RNA, 23 nt, synthetic construct
  source 1..23: mol_type = other RNA
  modified_base 1: mod_base = OTHER; note = 2'-O-methyladenosine-3'-phosphorothioate
  modified_base 2: mod_base = OTHER; note = 2'-deoxy-2'-fluorocytidine-3'-phosphorothioate
  modified_base 3: mod_base = OTHER; note = 2'-O-methylcytidine-3'-phosphate
  modified_base 4: mod_base = OTHER; note = 2'-O-methyluridine-3'-phosphate
  modified_base 5: mod_base = OTHER; note = 2'-O-methyluridine-3'-phosphate
  modified_base 6: mod_base = OTHER; note = 2'-deoxy-2'-fluorocytidine-3'-phosphate
  modified_base 7: mod_base = OTHER; note = 2'-O-methyluridine-3'-phosphate
  modified_base 8: mod_base = OTHER; note = 2'-O-methylguanosine-3'-phosphate
  modified_base 9: mod_base = OTHER; note = 2'-O-methylcytidine-3'-phosphate
  modified_base 10: mod_base = OTHER; note = 2'-O-methyluridine-3'-phosphate
  modified_base 11: mod_base = OTHER; note = 2'-O-methylcytidine-3'-phosphate
  modified_base 12: mod_base = OTHER; note = 2'-O-methylguanosine-3'-phosphate
  modified_base 13: mod_base = OTHER; note = 2'-O-methyladenosine-3'-phosphate
  modified_base 14: mod_base = OTHER; note = 2'-deoxy-2'-fluoroadenosine-3'-phosphate
  modified_base 15: mod_base = OTHER; note = 2'-O-methyladenosine-3'-phosphate
  modified_base 16: mod_base = OTHER; note = 2'-deoxy-2'-fluorouridine-3'-phosphate
  modified_base 17: mod_base = OTHER; note = 2'-O-methyluridine-3'-phosphate
  modified_base 18: mod_base = OTHER; note = 2'-O-methylguanosine-3'-phosphate
  modified_base 19: mod_base = OTHER; note = 2'-O-methyladenosine-3'-phosphate
  modified_base 20: mod_base = OTHER; note = 2'-O-methyluridine-3'-phosphate
  modified_base 21: mod_base = OTHER; note = 2'-O-methylguanosine-3'-phosphorothioate
  modified_base 22: mod_base = OTHER; note = 2'-O-methyladenosine-3'-phosphorothioate
  modified_base 23: mod_base = OTHER; note = 2'-O-methyluridine
accttctgctcgaaattgatgat

SEQ ID NO: 1159 - DNA, 23 bp, synthetic construct
  source 1..23: mol_type = other DNA
  modified_base 1: mod_base = OTHER; note = 2'-O-methyluridine-3'-phosphorothioate
  modified_base 2: mod_base = OTHER; note = 2'-deoxy-2'-fluorouridine-3'-phosphorothioate
  modified_base 3: mod_base = OTHER; note = 2'-O-methylcytidine-3'-phosphate
  modified_base 4: mod_base = OTHER; note = 2'-O-methylcytidine-3'-phosphate
  modified_base 6: mod_base = OTHER; note = 2'-O-methyluridine-3'-phosphate
  modified_base 7: mod_base = OTHER; note = cytidine-2'-phosphate
  modified_base 8: mod_base = OTHER; note = 2'-O-methyluridine-3'-phosphate
  modified_base 9: mod_base = OTHER; note = 2'-O-methylguanosine-3'-phosphate
  modified_base 10: mod_base = OTHER; note = 2'-O-methylcytidine-3'-phosphate
  modified_base 11: mod_base = OTHER; note = 2'-O-methyluridine-3'-phosphate
  modified_base 12: mod_base = OTHER; note = 2'-O-methylcytidine-3'-phosphate
  modified_base 13: mod_base = OTHER; note = 2'-O-methylguanosine-3'-phosphate
  modified_base 14: mod_base = OTHER; note = 2'-deoxy-2'-fluoroadenosine-3'-phosphate
  modified_base 15: mod_base = OTHER; note = 2'-O-methyladenosine-3'-phosphate
  modified_base 16: mod_base = OTHER; note = 2'-deoxy-2'-fluoroadenosine-3'-phosphate
  modified_base 17: mod_base = OTHER; note = 2'-O-methyluridine-3'-phosphate
  modified_base 18: mod_base = OTHER; note = 2'-O-methyluridine-3'-phosphate
  modified_base 19: mod_base = OTHER; note = 2'-O-methylguanosine-3'-phosphate
  modified_base 20: mod_base = OTHER; note = 2'-O-methyladenosine-3'-phosphate
  modified_base 21: mod_base = OTHER; note = 2'-O-methyluridine-3'-phosphorothioate
  modified_base 22: mod_base = OTHER; note = 2'-O-methylguanosine-3'-phosphorothioate
  modified_base 23: mod_base = OTHER; note = 2'-O-methyladenosine
  misc_feature 1..4: note = RNA
  misc_feature 6..23: note = RNA
  misc_feature 5: note = DNA
ttccttctgctcgaaattgatga

SEQ ID NO: 1160 - DNA, 23 bp, synthetic construct
  source 1..23: mol_type = other DNA
  modified_base 1: mod_base = OTHER; note = 2'-O-methyluridine-3'-phosphorothioate
  modified_base 2: mod_base = OTHER; note = 2'-deoxy-2'-fluorouridine-3'-phosphorothioate
  modified_base 3: mod_base = OTHER; note = 2'-O-methyluridine-3'-phosphate
  modified_base 4: mod_base = OTHER; note = 2'-O-methylcytidine-3'-phosphate
  modified_base 6: mod_base = OTHER; note = 2'-O-methyluridine-3'-phosphate
  modified_base 7: mod_base = OTHER; note = Thymidine-glycol nucleic acid (GNA), S-Isomer
  modified_base 8: mod_base = OTHER; note = 2'-O-methylcytidine-3'-phosphate
  modified_base 9: mod_base = OTHER; note = 2'-O-methyluridine-3'-phosphate
  modified_base 10: mod_base = OTHER; note = 2'-O-methylguanosine-3'-phosphate
  modified_base 11: mod_base = OTHER; note = 2'-O-methylcytidine-3'-phosphate
  modified_base 12: mod_base = OTHER; note = 2'-O-methyluridine-3'-phosphate
  modified_base 13: mod_base = OTHER; note = 2'-O-methylcytidine-3'-phosphate
  modified_base 14: mod_base = OTHER; note = 2'-deoxy-2'-fluoroguanosine-3'-phosphate
  modified_base 15: mod_base = OTHER; note = 2'-O-methyladenosine-3'-phosphate
  modified_base 16: mod_base = OTHER; note = 2'-deoxy-2'-fluoroadenosine-3'-phosphate
  modified_base 17: mod_base = OTHER; note = 2'-O-methyladenosine-3'-phosphate
  modified_base 18: mod_base = OTHER; note = 2'-O-methyluridine-3'-phosphate
  modified_base 19: mod_base = OTHER; note = 2'-O-methyluridine-3'-phosphate
  modified_base 20: mod_base = OTHER; note = 2'-O-methylguanosine-3'-phosphate
  modified_base 21: mod_base = OTHER; note = 2'-O-methyladenosine-3'-phosphorothioate
  modified_base 22: mod_base = OTHER; note = 2'-O-methyluridine-3'-phosphorothioate
  modified_base 23: mod_base = OTHER; note = 2'-O-methylguanosine
  misc_feature 1..4: note = RNA
  misc_feature 6..23: note = RNA
  misc_feature 5: note = DNA
tttccttctgctcgaaattgatg

SEQ ID NO: 1161 - DNA, 23 bp, synthetic construct
  source 1..23: mol_type = other DNA
  modified_base 1: mod_base = OTHER; note = 2'-O-methyladenosine-3'-phosphorothioate
  modified_base 2: mod_base = OTHER; note = 2'-deoxy-2'-fluorouridine-3'-phosphorothioate
  modified_base 3: mod_base = OTHER; note = 2'-O-methyluridine-3'-phosphate
  modified_base 4: mod_base = OTHER; note = 2'-O-methyluridine-3'-phosphate
  modified_base 6: mod_base = OTHER; note = 2'-O-methylcytidine-3'-phosphate
  modified_base 7: mod_base = OTHER; note = Thymidine-glycol nucleic acid (GNA), S-Isomer
  modified_base 8: mod_base = OTHER; note = 2'-O-methyluridine-3'-phosphate
  modified_base 9: mod_base = OTHER; note = 2'-O-methylcytidine-3'-phosphate
  modified_base 10: mod_base = OTHER; note = 2'-O-methyluridine-3'-phosphate
  modified_base 11: mod_base = OTHER; note = 2'-O-methylguanosine-3'-phosphate
  modified_base 12: mod_base = OTHER; note = 2'-O-methylcytidine-3'-phosphate
  modified_base 13: mod_base = OTHER; note = 2'-O-methyluridine-3'-phosphate
  modified_base 14: mod_base = OTHER; note = 2'-deoxy-2'-fluorocytidine-3'-phosphate
  modified_base 15: mod_base = OTHER; note = 2'-O-methylguanosine-3'-phosphate
  modified_base 16: mod_base = OTHER; note = 2'-deoxy-2'-fluoroadenosine-3'-phosphate
  modified_base 17: mod_base = OTHER; note = 2'-O-methyladenosine-3'-phosphate
  modified_base 18: mod_base = OTHER; note = 2'-O-methyladenosine-3'-phosphate
  modified_base 19: mod_base = OTHER; note = 2'-O-methyluridine-3'-phosphate
  modified_base 20: mod_base = OTHER; note = 2'-O-methyluridine-3'-phosphate
  modified_base 21: mod_base = OTHER; note = 2'-O-methylguanosine-3'-phosphorothioate
  modified_base 22: mod_base = OTHER; note = 2'-O-methyladenosine-3'-phosphorothioate
  modified_base 23: mod_base = OTHER; note = 2'-O-methyluridine
  misc_feature 1..4: note = RNA
  misc_feature 6..23: note = RNA
  misc_feature 5: note = DNA
atttccttctgctcgaaattgat

SEQ ID NO: 1162 - DNA, 23 bp, synthetic construct
  source 1..23: mol_type = other DNA
  modified_base 1: mod_base = OTHER; note = 2'-O-methyladenosine-3'-phosphorothioate
  modified_base 2: mod_base = OTHER; note = 2'-deoxy-2'-fluorocytidine-3'-phosphorothioate
  modified_base 3: mod_base = OTHER; note = 2'-O-methyluridine-3'-phosphate
  modified_base 4: mod_base = OTHER; note = 2'-O-methyluridine-3'-phosphate
  modified_base 6: mod_base = OTHER; note = 2'-O-methylcytidine-3'-phosphate
  modified_base 7: mod_base = OTHER; note = cytidine-2'-phosphate
  modified_base 8: mod_base = OTHER; note = 2'-O-methyluridine-3'-phosphate
  modified_base 9: mod_base = OTHER; note = 2'-O-methyluridine-3'-phosphate
  modified_base 10: mod_base = OTHER; note = 2'-O-methylcytidine-3'-phosphate
  modified_base 11: mod_base = OTHER; note = 2'-O-methyluridine-3'-phosphate
  modified_base 12: mod_base = OTHER; note = 2'-O-methylguanosine-3'-phosphate
  modified_base 13: mod_base = OTHER; note = 2'-O-methylcytidine-3'-phosphate
  modified_base 14: mod_base = OTHER; note = 2'-deoxy-2'-fluorouridine-3'-phosphate
  modified_base 15: mod_base = OTHER; note = 2'-O-methylcytidine-3'-phosphate
  modified_base 16: mod_base = OTHER; note = 2'-deoxy-2'-fluoroguanosine-3'-phosphate
  modified_base 17: mod_base = OTHER; note = 2'-O-methyladenosine-3'-phosphate
  modified_base 18: mod_base = OTHER; note = 2'-O-methyladenosine-3'-phosphate
  modified_base 19: mod_base = OTHER; note = 2'-O-methyladenosine-3'-phosphate
  modified_base 20: mod_base = OTHER; note = 2'-O-methyluridine-3'-phosphate
  modified_base 21: mod_base = OTHER; note = 2'-O-methyluridine-3'-phosphorothioate
  modified_base 22: mod_base = OTHER; note = 2'-O-methylguanosine-3'-phosphorothioate
  modified_base 23: mod_base = OTHER; note = 2'-O-methyladenosine
  misc_feature 1..4: note = RNA
  misc_feature 6..23: note = RNA
  misc_feature 5: note = DNA
actttccttctgctcgaaattga

SEQ ID NO: 1163 - DNA, 23 bp, synthetic construct
  source 1..23: mol_type = other DNA
  modified_base 1: mod_base = OTHER; note = 2'-O-methyluridine-3'-phosphorothioate
  modified_base 2: mod_base = OTHER; note = 2'-deoxy-2'-fluoroadenosine-3'-phosphorothioate
  modified_base 3: mod_base = OTHER; note = 2'-O-methylcytidine-3'-phosphate
  modified_base 4: mod_base = OTHER; note = 2'-O-methyluridine-3'-phosphate
  modified_base 6: mod_base = OTHER; note = 2'-O-methyluridine-3'-phosphate
  modified_base 7: mod_base = OTHER; note = cytidine-2'-phosphate
  modified_base 8: mod_base = OTHER; note = 2'-O-methylcytidine-3'-phosphate
  modified_base 9: mod_base = OTHER; note = 2'-O-methyluridine-3'-phosphate
  modified_base 10: mod_base = OTHER; note = 2'-O-methyluridine-3'-phosphate
  modified_base 11: mod_base = OTHER; note = 2'-O-methylcytidine-3'-phosphate
  modified_base 12: mod_base = OTHER; note = 2'-O-methyluridine-3'-phosphate
  modified_base 13: mod_base = OTHER; note = 2'-O-methylguanosine-3'-phosphate
  modified_base 14: mod_base = OTHER; note = 2'-deoxy-2'-fluorocytidine-3'-phosphate
  modified_base 15: mod_base = OTHER; note = 2'-O-methyluridine-3'-phosphate
  modified_base 16: mod_base = OTHER; note = 2'-deoxy-2'-fluorocytidine-3'-phosphate
  modified_base 17: mod_base = OTHER; note = 2'-O-methylguanosine-3'-phosphate
  modified_base 18: mod_base = OTHER; note = 2'-O-methyladenosine-3'-phosphate
  modified_base 19: mod_base = OTHER; note = 2'-O-methyladenosine-3'-phosphate
  modified_base 20: mod_base = OTHER; note = 2'-O-methyladenosine-3'-phosphate
  modified_base 21: mod_base = OTHER; note = 2'-O-methyluridine-3'-phosphorothioate
  modified_base 22: mod_base = OTHER; note = 2'-O-methyluridine-3'-phosphorothioate
  modified_base 23: mod_base = OTHER; note = 2'-O-methylguanosine
  misc_feature 1..4: note = RNA
  misc_feature 6..23: note = RNA
  misc_feature 5: note = DNA
tactttccttctgctcgaaattg

SEQ ID NO: 1164 - DNA, 23 bp, synthetic construct
  source 1..23: mol_type = other DNA
  modified_base 1: mod_base = OTHER; note = 2'-O-methyluridine-3'-phosphorothioate
  modified_base 2: mod_base = OTHER; note = 2'-deoxy-2'-fluorouridine-3'-phosphorothioate
  modified_base 3: mod_base = OTHER; note = 2'-O-methyladenosine-3'-phosphate
  modified_base 4: mod_base = OTHER; note = 2'-O-methylcytidine-3'-phosphate
  modified_base 6: mod_base = OTHER; note = 2'-O-methyluridine-3'-phosphate
  modified_base 7: mod_base = OTHER; note = Thymidine-glycol nucleic acid (GNA), S-Isomer
  modified_base 8: mod_base = OTHER; note = 2'-O-methylcytidine-3'-phosphate
  modified_base 9: mod_base = OTHER; note = 2'-O-methylcytidine-3'-phosphate
  modified_base 10: mod_base = OTHER; note = 2'-O-methyluridine-3'-phosphate
  modified_base 11: mod_base = OTHER; note = 2'-O-methyluridine-3'-phosphate
  modified_base 12: mod_base = OTHER; note = 2'-O-methylcytidine-3'-phosphate
  modified_base 13: mod_base = OTHER; note = 2'-O-methyluridine-3'-phosphate
  modified_base 14: mod_base = OTHER; note = 2'-deoxy-2'-fluoroguanosine-3'-phosphate
  modified_base 15: mod_base = OTHER; note = 2'-O-methylcytidine-3'-phosphate
  modified_base 16: mod_base = OTHER; note = 2'-deoxy-2'-fluorouridine-3'-phosphate
  modified_base 17: mod_base = OTHER; note = 2'-O-methylcytidine-3'-phosphate
  modified_base 18: mod_base = OTHER; note = 2'-O-methylguanosine-3'-phosphate
  modified_base 19: mod_base = OTHER; note = 2'-O-methyladenosine-3'-phosphate
  modified_base 20: mod_base = OTHER; note = 2'-O-methyladenosine-3'-phosphate
  modified_base 21: mod_base = OTHER; note = 2'-O-methyladenosine-3'-phosphorothioate
  modified_base 22: mod_base = OTHER; note = 2'-O-methyluridine-3'-phosphorothioate
  modified_base 23: mod_base = OTHER; note = 2'-O-methyluridine
  misc_feature 1..4: note = RNA
  misc_feature 6..23: note = RNA
  misc_feature 5: note = DNA
ttactttccttctgctcgaaatt

SEQ ID NO: 1165 - DNA, 23 bp, synthetic construct
  source 1..23: mol_type = other DNA
  modified_base 1: mod_base = OTHER; note = 2'-O-methyladenosine-3'-phosphorothioate
  modified_base 2: mod_base = OTHER; note = 2'-deoxy-2'-fluorouridine-3'-phosphorothioate
  modified_base 3: mod_base = OTHER; note = 2'-O-methyluridine-3'-phosphate
  modified_base 4: mod_base = OTHER; note = 2'-O-methyladenosine-3'-phosphate
  modified_base 6: mod_base = OTHER; note = 2'-O-methyluridine-3'-phosphate
  modified_base 7: mod_base = OTHER; note = Thymidine-glycol nucleic acid (GNA), S-Isomer
  modified_base 8: mod_base = OTHER; note = 2'-O-methyluridine-3'-phosphate
  modified_base 9: mod_base = OTHER; note = 2'-O-methylcytidine-3'-phosphate
  modified_base 10: mod_base = OTHER; note = 2'-O-methylcytidine-3'-phosphate
  modified_base 11: mod_base = OTHER; note = 2'-O-methyluridine-3'-phosphate
  modified_base 12: mod_base = OTHER; note = 2'-O-methyluridine-3'-phosphate
  modified_base 13: mod_base = OTHER; note = 2'-O-methylcytidine-3'-phosphate
  modified_base 14: mod_base = OTHER; note = 2'-deoxy-2'-fluorouridine-3'-phosphate
  modified_base 15: mod_base = OTHER; note = 2'-O-methylguanosine-3'-phosphate
  modified_base 16: mod_base = OTHER; note = 2'-deoxy-2'-fluorocytidine-3'-phosphate
  modified_base 17: mod_base = OTHER; note = 2'-O-methyluridine-3'-phosphate
  modified_base 18: mod_base = OTHER; note = 2'-O-methylcytidine-3'-phosphate
  modified_base 19: mod_base = OTHER; note = 2'-O-methylguanosine-3'-phosphate
  modified_base 20: mod_base = OTHER; note = 2'-O-methyladenosine-3'-phosphate
  modified_base 21: mod_base = OTHER; note = 2'-O-methyladenosine-3'-phosphorothioate
  modified_base 22: mod_base = OTHER; note = 2'-O-methyladenosine-3'-phosphorothioate
  modified_base 23: mod_base = OTHER; note = 2'-O-methyluridine
  misc_feature 1..4: note = RNA
  misc_feature 6..23: note = RNA
  misc_feature 5: note = DNA
attactttccttctgctcgaaat

SEQ ID NO: 1166 - DNA, 23 bp, synthetic construct
  source 1..23: mol_type = other DNA
  modified_base 1: mod_base = OTHER; note = 2'-O-methyladenosine-3'-phosphorothioate
  modified_base 2: mod_base = OTHER; note = 2'-deoxy-2'-fluoroadenosine-3'-phosphorothioate
  modified_base 3: mod_base = OTHER; note = 2'-O-methyluridine-3'-phosphate
  modified_base 4: mod_base = OTHER; note = 2'-O-methyluridine-3'-phosphate
  modified_base 6: mod_base = OTHER; note = 2'-O-methylcytidine-3'-phosphate
  modified_base 7: mod_base = OTHER; note = Thymidine-glycol nucleic acid (GNA), S-Isomer
  modified_base 8: mod_base = OTHER; note = 2'-O-methyluridine-3'-phosphate
  modified_base 9: mod_base = OTHER; note = 2'-O-methyluridine-3'-phosphate
  modified_base 10: mod_base = OTHER; note = 2'-O-methylcytidine-3'-phosphate
  modified_base 11: mod_base = OTHER; note = 2'-O-methylcytidine-3'-phosphate
  modified_base 12: mod_base = OTHER; note = 2'-O-methyluridine-3'-phosphate
  modified_base 13: mod_base = OTHER; note = 2'-O-methyluridine-3'-phosphate
  modified_base 14: mod_base = OTHER; note = 2'-deoxy-2'-fluorocytidine-3'-phosphate
  modified_base 15: mod_base = OTHER; note = 2'-O-methyluridine-3'-phosphate
  modified_base 16: mod_base = OTHER; note = 2'-deoxy-2'-fluoroguanosine-3'-phosphate
  modified_base 17: mod_base = OTHER; note = 2'-O-methylcytidine-3'-phosphate
  modified_base 18: mod_base = OTHER; note = 2'-O-methyluridine-3'-phosphate
  modified_base 19: mod_base = OTHER; note = 2'-O-methylcytidine-3'-phosphate
  modified_base 20: mod_base = OTHER; note = 2'-O-methylguanosine-3'-phosphate
  modified_base 21: mod_base = OTHER; note = 2'-O-methyladenosine-3'-phosphorothioate
  modified_base 22: mod_base = OTHER; note = 2'-O-methyladenosine-3'-phosphorothioate
  modified_base 23: mod_base = OTHER; note = 2'-O-methyladenosine
  misc_feature 1..4: note = RNA
  misc_feature 6..23: note = RNA
  misc_feature 5: note = DNA
aattactttccttctgctcgaaa

SEQ ID NO: 1167 - RNA, 23 nt, synthetic construct
  source 1..23: mol_type = other RNA
  modified_base 1: mod_base = OTHER; note = 2'-O-methyladenosine-3'-phosphorothioate
  modified_base 2: mod_base = OTHER; note = 2'-deoxy-2'-fluorocytidine-3'-phosphorothioate
  modified_base 3: mod_base = OTHER; note = 2'-O-methyladenosine-3'-phosphate
  modified_base 4: mod_base = OTHER; note = 2'-O-methyluridine-3'-phosphate
  modified_base 5: mod_base = OTHER; note = 2'-O-methyluridine-3'-phosphate
  modified_base 6: mod_base = OTHER; note = 2'-deoxy-2'-fluoroadenosine-3'-phosphate
  modified_base 7: mod_base = OTHER; note = 2'-O-methylcytidine-3'-phosphate
  modified_base 8: mod_base = OTHER; note = 2'-O-methyluridine-3'-phosphate
  modified_base 9: mod_base = OTHER; note = 2'-O-methyluridine-3'-phosphate
  modified_base 10: mod_base = OTHER; note = 2'-O-methyluridine-3'-phosphate
  modified_base 11: mod_base = OTHER; note = 2'-O-methylcytidine-3'-phosphate
  modified_base 12: mod_base = OTHER; note = 2'-O-methylcytidine-3'-phosphate
  modified_base 13: mod_base = OTHER; note = 2'-O-methyluridine-3'-phosphate
  modified_base 14: mod_base = OTHER; note = 2'-deoxy-2'-fluorouridine-3'-phosphate
  modified_base 15: mod_base = OTHER; note = 2'-O-methylcytidine-3'-phosphate
  modified_base 16: mod_base = OTHER; note = 2'-deoxy-2'-fluorouridine-3'-phosphate
  modified_base 17: mod_base = OTHER; note = 2'-O-methylguanosine-3'-phosphate
  modified_base 18: mod_base = OTHER; note = 2'-O-methylcytidine-3'-phosphate
  modified_base 19: mod_base = OTHER; note = 2'-O-methyluridine-3'-phosphate
  modified_base 20: mod_base = OTHER; note = 2'-O-methylcytidine-3'-phosphate
  modified_base 21: mod_base = OTHER; note = 2'-O-methylguanosine-3'-phosphorothioate
  modified_base 22: mod_base = OTHER; note = 2'-O-methyladenosine-3'-phosphorothioate
  modified_base 23: mod_base = OTHER; note = 2'-O-methyladenosine
acattactttccttctgctcgaa

SEQ ID NO: 1168 - RNA, 23 nt, synthetic construct
  source 1..23: mol_type = other RNA
  modified_base 1: mod_base = OTHER; note = 2'-O-methyladenosine-3'-phosphorothioate
  modified_base 2: mod_base = OTHER; note = 2'-deoxy-2'-fluorocytidine-3'-phosphorothioate
  modified_base 3: mod_base = OTHER; note = 2'-O-methylcytidine-3'-phosphate
  modified_base 4: mod_base = OTHER; note = 2'-O-methyladenosine-3'-phosphate
  modified_base 5: mod_base = OTHER; note = 2'-O-methyluridine-3'-phosphate
  modified_base 6: mod_base = OTHER; note = 2'-deoxy-2'-fluorouridine-3'-phosphate
  modified_base 7: mod_base = OTHER; note = 2'-O-methyladenosine-3'-phosphate
  modified_base 8: mod_base = OTHER; note = 2'-O-methylcytidine-3'-phosphate
  modified_base 9: mod_base = OTHER; note = 2'-O-methyluridine-3'-phosphate
  modified_base 10: mod_base = OTHER; note = 2'-O-methyluridine-3'-phosphate
  modified_base 11: mod_base = OTHER; note = 2'-O-methyluridine-3'-phosphate
  modified_base 12: mod_base = OTHER; note = 2'-O-methylcytidine-3'-phosphate
  modified_base 13: mod_base = OTHER; note = 2'-O-methylcytidine-3'-phosphate
  modified_base 14: mod_base = OTHER; note = 2'-deoxy-2'-fluorouridine-3'-phosphate
  modified_base 15: mod_base = OTHER; note = 2'-O-methyluridine-3'-phosphate
  modified_base 16: mod_base = OTHER; note = 2'-deoxy-2'-fluorocytidine-3'-phosphate
  modified_base 17: mod_base = OTHER; note = 2'-O-methyluridine-3'-phosphate
  modified_base 18: mod_base = OTHER; note = 2'-O-methylguanosine-3'-phosphate
  modified_base 19: mod_base = OTHER; note = 2'-O-methylcytidine-3'-phosphate
  modified_base 20: mod_base = OTHER; note = 2'-O-methyluridine-3'-phosphate
  modified_base 21: mod_base = OTHER; note = 2'-O-methylcytidine-3'-phosphorothioate
  modified_base 22: mod_base = OTHER; note = 2'-O-methylguanosine-3'-phosphorothioate
  modified_base 23: mod_base = OTHER; note = 2'-O-methyladenosine
accattactttccttctgctcga

SEQ ID NO: 1169 - RNA, 23 nt, synthetic construct
  source 1..23: mol_type = other RNA
  modified_base 1: mod_base = OTHER; note = 2'-O-methyladenosine-3'-phosphorothioate
  modified_base 2: mod_base = OTHER; note = 2'-deoxy-2'-fluorouridine-3'-phosphorothioate
  modified_base 3: mod_base = OTHER; note = 2'-O-methylcytidine-3'-phosphate
  modified_base 4: mod_base = OTHER; note = 2'-O-methylcytidine-3'-phosphate
  modified_base 5: mod_base = OTHER; note = 2'-O-methyladenosine-3'-phosphate
  modified_base 6: mod_base = OTHER; note = 2'-deoxy-2'-fluorouridine-3'-phosphate
  modified_base 7: mod_base = OTHER; note = 2'-O-methyluridine-3'-phosphate
  modified_base 8: mod_base = OTHER; note = 2'-O-methyladenosine-3'-phosphate
  modified_base 9: mod_base = OTHER; note = 2'-O-methylcytidine-3'-phosphate
  modified_base 10: mod_base = OTHER; note = 2'-O-methyluridine-3'-phosphate
  modified_base 11: mod_base = OTHER; note = 2'-O-methyluridine-3'-phosphate
  modified_base 12: mod_base = OTHER; note = 2'-O-methyluridine-3'-phosphate
  modified_base 13: mod_base = OTHER; note = 2'-O-methylcytidine-3'-phosphate
  modified_base 14: mod_base = OTHER; note = 2'-deoxy-2'-fluorocytidine-3'-phosphate
  modified_base 15: mod_base = OTHER; note = 2'-O-methyluridine-3'-phosphate
  modified_base 16: mod_base = OTHER; note = 2'-deoxy-2'-fluorouridine-3'-phosphate
  modified_base 17: mod_base = OTHER; note = 2'-O-methylcytidine-3'-phosphate
  modified_base 18: mod_base = OTHER; note = 2'-O-methyluridine-3'-phosphate
  modified_base 19: mod_base = OTHER; note = 2'-O-methylguanosine-3'-phosphate
  modified_base 20: mod_base = OTHER; note = 2'-O-methylcytidine-3'-phosphate
  modified_base 21: mod_base = OTHER; note = 2'-O-methyluridine-3'-phosphorothioate
  modified_base 22: mod_base = OTHER; note = 2'-O-methylcytidine-3'-phosphorothioate
  modified_base 23: mod_base = OTHER; note = 2'-O-methylguanosine
atccattactttccttctgctcg

SEQ ID NO: 1170 - DNA, 23 bp, synthetic construct
  source 1..23: mol_type = other DNA
  modified_base 1: mod_base = OTHER; note = 2'-O-methyladenosine-3'-phosphorothioate
  modified_base 2: mod_base = OTHER; note = 2'-deoxy-2'-fluoroguanosine-3'-phosphorothioate
  modified_base 3: mod_base = OTHER; note = 2'-O-methyluridine-3'-phosphate
  modified_base 4: mod_base = OTHER; note = 2'-O-methylcytidine-3'-phosphate
  modified_base 6: mod_base = OTHER; note = 2'-O-methyladenosine-3'-phosphate
  modified_base 7: mod_base = OTHER; note = Thymidine-glycol nucleic acid (GNA), S-Isomer
  modified_base 8: mod_base = OTHER; note = 2'-O-methyluridine-3'-phosphate
  modified_base 9: mod_base = OTHER; note = 2'-O-methyladenosine-3'-phosphate
  modified_base 10: mod_base = OTHER; note = 2'-O-methylcytidine-3'-phosphate
  modified_base 11: mod_base = OTHER; note = 2'-O-methyluridine-3'-phosphate
  modified_base 12: mod_base = OTHER; note = 2'-O-methyluridine-3'-phosphate
  modified_base 13: mod_base = OTHER; note = 2'-O-methyluridine-3'-phosphate
  modified_base 14: mod_base = OTHER; note = 2'-deoxy-2'-fluorocytidine-3'-phosphate
  modified_base 15: mod_base = OTHER; note = 2'-O-methylcytidine-3'-phosphate
  modified_base 16: mod_base = OTHER; note = 2'-deoxy-2'-fluorouridine-3'-phosphate
  modified_base 17: mod_base = OTHER; note = 2'-O-methyluridine-3'-phosphate
  modified_base 18: mod_base = OTHER; note = 2'-O-methylcytidine-3'-phosphate
  modified_base 19: mod_base = OTHER; note = 2'-O-methyluridine-3'-phosphate
  modified_base 20: mod_base = OTHER; note = 2'-O-methylguanosine-3'-phosphate
  modified_base 21: mod_base = OTHER; note = 2'-O-methylcytidine-3'-phosphorothioate
  modified_base 22: mod_base = OTHER; note = 2'-O-methyluridine-3'-phosphorothioate
  modified_base 23: mod_base = OTHER; note = 2'-O-methylcytidine
  misc_feature 1..4: note = RNA
  misc_feature 6..23: note = RNA
  misc_feature 5: note = DNA
agtccattactttccttctgctc

SEQ ID NO: 1171 - DNA, 23 bp, synthetic construct
  source 1..23: mol_type = other DNA
  modified_base 1: mod_base = OTHER; note = 2'-O-methyluridine-3'-phosphorothioate
  modified_base 2: mod_base = OTHER; note = 2'-deoxy-2'-fluoroguanosine-3'-phosphorothioate
  modified_base 3: mod_base = OTHER; note = 2'-O-methylguanosine-3'-phosphate
  modified_base 4: mod_base = OTHER; note = 2'-O-methyluridine-3'-phosphate
  modified_base 6: mod_base = OTHER; note = 2'-O-methylcytidine-3'-phosphate
  modified_base 7: mod_base = OTHER; note = Adenosine-glycol nucleic acid (GNA), S-isomer
  modified_base 8: mod_base = OTHER; note = 2'-O-methyluridine-3'-phosphate
  modified_base 9: mod_base = OTHER; note = 2'-O-methyluridine-3'-phosphate
  modified_base 10: mod_base = OTHER; note = 2'-O-methyladenosine-3'-phosphate
  modified_base 11: mod_base = OTHER; note = 2'-O-methylcytidine-3'-phosphate
  modified_base 12: mod_base = OTHER; note = 2'-O-methyluridine-3'-phosphate
  modified_base 13: mod_base = OTHER; note = 2'-O-methyluridine-3'-phosphate
  modified_base 14: mod_base = OTHER; note = 2'-deoxy-2'-fluorouridine-3'-phosphate
  modified_base 15: mod_base = OTHER; note = 2'-O-methylcytidine-3'-phosphate
  modified_base 16: mod_base = OTHER; note = 2'-deoxy-2'-fluorocytidine-3'-phosphate
  modified_base 17: mod_base = OTHER; note = 2'-O-methyluridine-3'-phosphate
  modified_base 18: mod_base = OTHER; note = 2'-O-methyluridine-3'-phosphate
  modified_base 19: mod_base = OTHER; note = 2'-O-methylcytidine-3'-phosphate
  modified_base 20: mod_base = OTHER; note = 2'-O-methyluridine-3'-phosphate
  modified_base 21: mod_base = OTHER; note = 2'-O-methylguanosine-3'-phosphorothioate
  modified_base 22: mod_base = OTHER; note = 2'-O-methylcytidine-3'-phosphorothioate
  modified_base 23: mod_base = OTHER; note = 2'-O-methyluridine
  misc_feature 1..4: note = RNA
  misc_feature 6..23: note = RNA
  misc_feature 5: note = DNA
tggtccattactttccttctgct

SEQ ID NO: 1172 - DNA, 23 bp, synthetic construct
  source 1..23: mol_type = other DNA
  modified_base 1: mod_base = OTHER; note = 2'-O-methyladenosine-3'-phosphorothioate
  modified_base 2: mod_base = OTHER; note = 2'-deoxy-2'-fluorouridine-3'-phosphorothioate
  modified_base 3: mod_base = OTHER; note = 2'-O-methylguanosine-3'-phosphate
  modified_base 4: mod_base = OTHER; note = 2'-O-methylguanosine-3'-phosphate
  modified_base 6: mod_base = OTHER; note = 2'-O-methylcytidine-3'-phosphate
  modified_base 7: mod_base = OTHER; note = cytidine-2'-phosphate
  modified_base 8: mod_base = OTHER; note = 2'-O-methyladenosine-3'-phosphate
  modified_base 9: mod_base = OTHER; note = 2'-O-methyluridine-3'-phosphate
  modified_base 10: mod_base = OTHER; note = 2'-O-methyluridine-3'-phosphate
  modified_base 11: mod_base = OTHER; note = 2'-O-methyladenosine-3'-phosphate
  modified_base 12: mod_base = OTHER; note = 2'-O-methylcytidine-3'-phosphate
  modified_base 13: mod_base = OTHER; note = 2'-O-methyluridine-3'-phosphate
  modified_base 14: mod_base = OTHER; note = 2'-deoxy-2'-fluorouridine-3'-phosphate
  modified_base 15: mod_base = OTHER; note = 2'-O-methyluridine-3'-phosphate
  modified_base 16: mod_base = OTHER; note = 2'-deoxy-2'-fluorocytidine-3'-phosphate
  modified_base 17: mod_base = OTHER; note = 2'-O-methylcytidine-3'-phosphate
  modified_base 18: mod_base = OTHER; note = 2'-O-methyluridine-3'-phosphate
  modified_base 19: mod_base = OTHER; note = 2'-O-methyluridine-3'-phosphate
  modified_base 20: mod_base = OTHER; note = 2'-O-methylcytidine-3'-phosphate
  modified_base 21: mod_base = OTHER; note = 2'-O-methyluridine-3'-phosphorothioate
  modified_base 22: mod_base = OTHER; note = 2'-O-methylguanosine-3'-phosphorothioate
  modified_base 23: mod_base = OTHER; note = 2'-O-methylcytidine
  misc_feature 1..4: note = RNA
  misc_feature 6..23: note = RNA
  misc_feature 5: note = DNA
atggtccattactttccttctgc

SEQ ID NO: 1173 - DNA, 23 bp, synthetic construct
  source 1..23: mol_type = other DNA
  modified_base 1: mod_base = OTHER; note = 2'-O-methyladenosine-3'-phosphorothioate
  modified_base 2: mod_base = OTHER; note = 2'-deoxy-2'-fluorocytidine-3'-phosphorothioate
  modified_base 3: mod_base = OTHER; note = 2'-O-methyluridine-3'-phosphate
  modified_base 4: mod_base = OTHER; note = 2'-O-methylguanosine-3'-phosphate
  modified_base 6: mod_base = OTHER; note = 2'-O-methyluridine-3'-phosphate
  modified_base 7: mod_base = OTHER; note = cytidine-2'-phosphate
  modified_base 8: mod_base = OTHER; note = 2'-O-methylcytidine-3'-phosphate
  modified_base 9: mod_base = OTHER; note = 2'-O-methyladenosine-3'-phosphate
  modified_base 10: mod_base = OTHER; note = 2'-O-methyluridine-3'-phosphate
  modified_base 11: mod_base = OTHER; note = 2'-O-methyluridine-3'-phosphate
  modified_base 12: mod_base = OTHER; note = 2'-O-methyladenosine-3'-phosphate
  modified_base 13: mod_base = OTHER; note = 2'-O-methylcytidine-3'-phosphate
  modified_base 14: mod_base = OTHER; note = 2'-deoxy-2'-fluorouridine-3'-phosphate
  modified_base 15: mod_base = OTHER; note = 2'-O-methyluridine-3'-phosphate
  modified_base 16: mod_base = OTHER; note = 2'-deoxy-2'-fluorouridine-3'-phosphate
  modified_base 17: mod_base = OTHER; note = 2'-O-methylcytidine-3'-phosphate
  modified_base 18: mod_base = OTHER; note = 2'-O-methylcytidine-3'-phosphate
  modified_base 19: mod_base = OTHER; note = 2'-O-methyluridine-3'-phosphate
  modified_base 20: mod_base = OTHER; note = 2'-O-methyluridine-3'-phosphate
  modified_base 21: mod_base = OTHER; note = 2'-O-methylcytidine-3'-phosphorothioate
  modified_base 22: mod_base = OTHER; note = 2'-O-methyluridine-3'-phosphorothioate
  modified_base 23: mod_base = OTHER; note = 2'-O-methylguanosine
  misc_feature 1..4: note = RNA
  misc_feature 6..23: note = RNA
  misc_feature 5: note = DNA
actggtccattactttccttctg

SEQ ID NO: 1174 - DNA, 23 bp, synthetic construct
  source 1..23: mol_type = other DNA
  modified_base 1: mod_base = OTHER; note = 2'-O-methyladenosine-3'-phosphorothioate
  modified_base 2: mod_base = OTHER; note = 2'-deoxy-2'-fluoroadenosine-3'-phosphorothioate
  modified_base 3: mod_base = OTHER; note = 2'-O-methylcytidine-3'-phosphate
  modified_base 4: mod_base = OTHER; note = 2'-O-methyluridine-3'-phosphate
  modified_base 6: mod_base = OTHER; note = 2'-O-methylguanosine-3'-phosphate
  modified_base 7: mod_base = OTHER; note = Thymidine-glycol nucleic acid (GNA), S-Isomer
  modified_base 8: mod_base = OTHER; note = 2'-O-methylcytidine-3'-phosphate
  modified_base 9: mod_base = OTHER; note = 2'-O-methylcytidine-3'-phosphate
  modified_base 10: mod_base = OTHER; note = 2'-O-methyladenosine-3'-phosphate
  modified_base 11: mod_base = OTHER; note = 2'-O-methyluridine-3'-phosphate
  modified_base 12: mod_base = OTHER; note = 2'-O-methyluridine-3'-phosphate
  modified_base 13: mod_base = OTHER; note = 2'-O-methyladenosine-3'-phosphate
  modified_base 14: mod_base = OTHER; note = 2'-deoxy-2'-fluorocytidine-3'-phosphate
  modified_base 15: mod_base = OTHER; note = 2'-O-methyluridine-3'-phosphate
  modified_base 16: mod_base = OTHER; note = 2'-deoxy-2'-fluorouridine-3'-phosphate
  modified_base 17: mod_base = OTHER; note = 2'-O-methyluridine-3'-phosphate
  modified_base 18: mod_base = OTHER; note = 2'-O-methylcytidine-3'-phosphate
  modified_base 19: mod_base = OTHER; note = 2'-O-methylcytidine-3'-phosphate
  modified_base 20: mod_base = OTHER; note = 2'-O-methyluridine-3'-phosphate
  modified_base 21: mod_base = OTHER; note = 2'-O-methyluridine-3'-phosphorothioate
  modified_base 22: mod_base = OTHER; note = 2'-O-methylcytidine-3'-phosphorothioate
  modified_base 23: mod_base = OTHER; note = 2'-O-methyluridine
  misc_feature 1..4: note = RNA
  misc_feature 6..23: note = RNA
  misc_feature 5: note = DNA
aactggtccattactttccttct

SEQ ID NO: 1175 - DNA, 23 bp, synthetic construct
  source 1..23: mol_type = other DNA
  modified_base 1: mod_base = OTHER; note = 2'-O-methyluridine-3'-phosphorothioate
  modified_base 2: mod_base = OTHER; note = 2'-deoxy-2'-fluorocytidine-3'-phosphorothioate
  modified_base 3: mod_base = OTHER; note = 2'-O-methyladenosine-3'-phosphate
  modified_base 4: mod_base = OTHER; note = 2'-O-methylcytidine-3'-phosphate
  modified_base 6: mod_base = OTHER; note = 2'-O-methylguanosine-3'-phosphate
  modified_base 7: mod_base = OTHER; note = guanosine-2'-phosphate
  modified_base 8: mod_base = OTHER; note = 2'-O-methyluridine-3'-phosphate
  modified_base 9: mod_base = OTHER; note = 2'-O-methylcytidine-3'-phosphate
  modified_base 10: mod_base = OTHER; note = 2'-O-methylcytidine-3'-phosphate
  modified_base 11: mod_base = OTHER; note = 2'-O-methyladenosine-3'-phosphate
  modified_base 12: mod_base = OTHER; note = 2'-O-methyluridine-3'-phosphate
  modified_base 13: mod_base = OTHER; note = 2'-O-methyluridine-3'-phosphate
  modified_base 14: mod_base = OTHER; note = 2'-deoxy-2'-fluoroadenosine-3'-phosphate
  modified_base 15: mod_base = OTHER; note = 2'-O-methylcytidine-3'-phosphate
  modified_base 16: mod_base = OTHER; note = 2'-deoxy-2'-fluorouridine-3'-phosphate
  modified_base 17: mod_base = OTHER; note = 2'-O-methyluridine-3'-phosphate
  modified_base 18: mod_base = OTHER; note = 2'-O-methyluridine-3'-phosphate
  modified_base 19: mod_base = OTHER; note = 2'-O-methylcytidine-3'-phosphate
  modified_base 20: mod_base = OTHER; note = 2'-O-methylcytidine-3'-phosphate
  modified_base 21: mod_base = OTHER; note = 2'-O-methyluridine-3'-phosphorothioate
  modified_base 22: mod_base = OTHER; note = 2'-O-methyluridine-3'-phosphorothioate
  modified_base 23: mod_base = OTHER; note = 2'-O-methylcytidine
  misc_feature 1..4: note = RNA
  misc_feature 6..23: note = RNA
  misc_feature 5: note = DNA
tcactggtccattactttccttc

SEQ ID NO: 1176 - DNA, 23 bp, synthetic construct
  source 1..23: mol_type = other DNA
  modified_base 1: mod_base = OTHER; note = 2'-O-methyluridine-3'-phosphorothioate
  modified_base 2: mod_base = OTHER; note = 2'-deoxy-2'-fluorouridine-3'-phosphorothioate
  modified_base 3: mod_base = OTHER; note = 2'-O-methylcytidine-3'-phosphate
  modified_base 4: mod_base = OTHER; note = 2'-O-methyladenosine-3'-phosphate
  modified_base 6: mod_base = OTHER; note = 2'-O-methyluridine-3'-phosphate
  modified_base 7: mod_base = OTHER; note = guanosine-2'-phosphate
  modified_base 8: mod_base = OTHER; note = 2'-O-methylguanosine-3'-phosphate
  modified_base 9: mod_base = OTHER; note = 2'-O-methyluridine-3'-phosphate
  modified_base 10: mod_base = OTHER; note = 2'-O-methylcytidine-3'-phosphate
  modified_base 11: mod_base = OTHER; note = 2'-O-methylcytidine-3'-phosphate
  modified_base 12: mod_base = OTHER; note = 2'-O-methyladenosine-3'-phosphate
  modified_base 13: mod_base = OTHER; note = 2'-O-methyluridine-3'-phosphate
  modified_base 14: mod_base = OTHER; note = 2'-deoxy-2'-fluorouridine-3'-phosphate
  modified_base 15: mod_base = OTHER; note = 2'-O-methyladenosine-3'-phosphate
  modified_base 16: mod_base = OTHER; note = 2'-deoxy-2'-fluorocytidine-3'-phosphate
  modified_base 17: mod_base = OTHER; note = 2'-O-methyluridine-3'-phosphate
  modified_base 18: mod_base = OTHER; note = 2'-O-methyluridine-3'-phosphate
  modified_base 19: mod_base = OTHER; note = 2'-O-methyluridine-3'-phosphate
  modified_base 20: mod_base = OTHER; note = 2'-O-methylcytidine-3'-phosphate
  modified_base 21: mod_base = OTHER; note = 2'-O-methylcytidine-3'-phosphorothioate
  modified_base 22: mod_base = OTHER; note = 2'-O-methyluridine-3'-phosphorothioate
  modified_base 23: mod_base = OTHER; note = 2'-O-methyluridine
  misc_feature 1..4: note = RNA
  misc_feature 6..23: note = RNA
  misc_feature 5: note = DNA
ttcactggtccattactttcctt

SEQ ID NO: 1177 - DNA, 23 bp, synthetic construct
  source 1..23: mol_type = other DNA
  modified_base 1: mod_base = OTHER; note = 2'-O-methyladenosine-3'-phosphorothioate
  modified_base 2: mod_base = OTHER; note = 2'-deoxy-2'-fluorouridine-3'-phosphorothioate
  modified_base 3: mod_base = OTHER; note = 2'-O-methyluridine-3'-phosphate
  modified_base 4: mod_base = OTHER; note = 2'-O-methylcytidine-3'-phosphate
  modified_base 6: mod_base = OTHER; note = 2'-O-methylcytidine-3'-phosphate
  modified_base 7: mod_base = OTHER; note = Thymidine-glycol nucleic acid (GNA), S-Isomer
  modified_base 8: mod_base = OTHER; note = 2'-O-methylguanosine-3'-phosphate
  modified_base 9: mod_base = OTHER; note = 2'-O-methylguanosine-3'-phosphate
  modified_base 10: mod_base = OTHER; note = 2'-O-methyluridine-3'-phosphate
  modified_base 11: mod_base = OTHER; note = 2'-O-methylcytidine-3'-phosphate
  modified_base 12: mod_base = OTHER; note = 2'-O-methylcytidine-3'-phosphate
  modified_base 13: mod_base = OTHER; note = 2'-O-methyladenosine-3'-phosphate
  modified_base 14: mod_base = OTHER; note = 2'-deoxy-2'-fluorouridine-3'-phosphate
  modified_base 15: mod_base = OTHER; note = 2'-O-methyluridine-3'-phosphate
  modified_base 16: mod_base = OTHER; note = 2'-deoxy-2'-fluoroadenosine-3'-phosphate
  modified_base 17: mod_base = OTHER; note = 2'-O-methylcytidine-3'-phosphate
  modified_base 18: mod_base = OTHER; note = 2'-O-methyluridine-3'-phosphate
  modified_base 19: mod_base = OTHER; note = 2'-O-methyluridine-3'-phosphate
  modified_base 20: mod_base = OTHER; note = 2'-O-methyluridine-3'-phosphate
  modified_base 21: mod_base = OTHER; note = 2'-O-methylcytidine-3'-phosphorothioate
  modified_base 22: mod_base = OTHER; note = 2'-O-methylcytidine-3'-phosphorothioate
  modified_base 23: mod_base = OTHER; note = 2'-O-methyluridine
  misc_feature 1..4: note = RNA
  misc_feature 6..23: note = RNA
  misc_feature 5: note = DNA
attcactggtccattactttcct

SEQ ID NO: 1178 - RNA, 23 nt, synthetic construct
  source 1..23: mol_type = other RNA
  modified_base 1: mod_base = OTHER; note = 2'-O-methyladenosine-3'-phosphorothioate
  modified_base 2: mod_base = OTHER; note = 2'-deoxy-2'-fluorocytidine-3'-phosphorothioate
  modified_base 3: mod_base = OTHER; note = 2'-O-methyluridine-3'-phosphate
  modified_base 4: mod_base = OTHER; note = 2'-O-methyluridine-3'-phosphate
  modified_base 5: mod_base = OTHER; note = 2'-O-methylcytidine-3'-phosphate
  modified_base 6: mod_base = OTHER; note = 2'-deoxy-2'-fluoroadenosine-3'-phosphate
  modified_base 7: mod_base = OTHER; note = 2'-O-methylcytidine-3'-phosphate
  modified_base 8: mod_base = OTHER; note = 2'-O-methyluridine-3'-phosphate
  modified_base 9: mod_base = OTHER; note = 2'-O-methylguanosine-3'-phosphate
  modified_base 10: mod_base = OTHER; note = 2'-O-methylguanosine-3'-phosphate
  modified_base 11: mod_base = OTHER; note = 2'-O-methyluridine-3'-phosphate
  modified_base 12: mod_base = OTHER; note = 2'-O-methylcytidine-3'-phosphate
  modified_base 13: mod_base = OTHER; note = 2'-O-methylcytidine-3'-phosphate
  modified_base 14: mod_base = OTHER; note = 2'-deoxy-2'-fluoroadenosine-3'-phosphate
  modified_base 15: mod_base = OTHER; note = 2'-O-methyluridine-3'-phosphate
  modified_base 16: mod_base = OTHER; note = 2'-deoxy-2'-fluorouridine-3'-phosphate
  modified_base 17: mod_base = OTHER; note = 2'-O-methyladenosine-3'-phosphate
  modified_base 18: mod_base = OTHER; note = 2'-O-methylcytidine-3'-phosphate
  modified_base 19: mod_base = OTHER; note = 2'-O-methyluridine-3'-phosphate
  modified_base 20: mod_base = OTHER; note = 2'-O-methyluridine-3'-phosphate
  modified_base 21: mod_base = OTHER; note = 2'-O-methyluridine-3'-phosphorothioate
  modified_base 22: mod_base = OTHER; note = 2'-O-methylcytidine-3'-phosphorothioate
  modified_base 23: mod_base = OTHER; note = 2'-O-methylcytidine
acttcactggtccattactttcc

SEQ ID NO: 1179 - RNA, 23 nt, synthetic construct
  source 1..23: mol_type = other RNA
  modified_base 1: mod_base = OTHER; note = 2'-O-methyladenosine-3'-phosphorothioate
  modified_base 2: mod_base = OTHER; note = 2'-deoxy-2'-fluorocytidine-3'-phosphorothioate
  modified_base 3: mod_base = OTHER; note = 2'-O-methylcytidine-3'-phosphate
  modified_base 4: mod_base = OTHER; note = 2'-O-methyluridine-3'-phosphate
  modified_base 5: mod_base = OTHER; note = 2'-O-methyluridine-3'-phosphate
  modified_base 6: mod_base = OTHER; note = 2'-deoxy-2'-fluorocytidine-3'-phosphate
  modified_base 7: mod_base = OTHER; note = 2'-O-methyladenosine-3'-phosphate
  modified_base 8: mod_base = OTHER; note = 2'-O-methylcytidine-3'-phosphate
  modified_base 9: mod_base = OTHER; note = 2'-O-methyluridine-3'-phosphate
  modified_base 10: mod_base = OTHER; note = 2'-O-methylguanosine-3'-phosphate
  modified_base 11: mod_base = OTHER; note = 2'-O-methylguanosine-3'-phosphate
  modified_base 12: mod_base = OTHER; note = 2'-O-methyluridine-3'-phosphate
  modified_base 13: mod_base = OTHER; note = 2'-O-methylcytidine-3'-phosphate
  modified_base 14: mod_base = OTHER; note = 2'-deoxy-2'-fluorocytidine-3'-phosphate
  modified_base 15: mod_base = OTHER; note = 2'-O-methyladenosine-3'-phosphate
  modified_base 16: mod_base = OTHER; note = 2'-deoxy-2'-fluorouridine-3'-phosphate
  modified_base 17: mod_base = OTHER; note = 2'-O-methyluridine-3'-phosphate
  modified_base 18: mod_base = OTHER; note = 2'-O-methyladenosine-3'-phosphate
  modified_base 19: mod_base = OTHER; note = 2'-O-methylcytidine-3'-phosphate
  modified_base 20: mod_base = OTHER; note = 2'-O-methyluridine-3'-phosphate
  modified_base 21: mod_base = OTHER; note = 2'-O-methyluridine-3'-phosphorothioate
  modified_base 22: mod_base = OTHER; note = 2'-O-methyluridine-3'-phosphorothioate
  modified_base 23: mod_base = OTHER; note = 2'-O-methylcytidine
accttcactggtccattactttc

SEQ ID NO: 1180 - DNA, 23 bp, synthetic construct
  source 1..23: mol_type = other DNA
  modified_base 1: mod_base = OTHER; note = 2'-O-methyladenosine-3'-phosphorothioate
  modified_base 2: mod_base = OTHER; note = 2'-deoxy-2'-fluoroadenosine-3'-phosphorothioate
  modified_base 3: mod_base = OTHER; note = 2'-O-methylcytidine-3'-phosphate
  modified_base 4: mod_base = OTHER; note = 2'-O-methylcytidine-3'-phosphate
  modified_base 6: mod_base = OTHER; note = 2'-O-methyluridine-3'-phosphate
  modified_base 7: mod_base = OTHER; note = cytidine-2'-phosphate
  modified_base 8: mod_base = OTHER; note = 2'-O-methyladenosine-3'-phosphate
  modified_base 9: mod_base = OTHER; note = 2'-O-methylcytidine-3'-phosphate
  modified_base 10: mod_base = OTHER; note = 2'-O-methyluridine-3'-phosphate
  modified_base 11: mod_base = OTHER; note = 2'-O-methylguanosine-3'-phosphate
  modified_base 12: mod_base = OTHER; note = 2'-O-methylguanosine-3'-phosphate
  modified_base 13: mod_base = OTHER; note = 2'-O-methyluridine-3'-phosphate
  modified_base 14: mod_base = OTHER; note = 2'-deoxy-2'-fluorocytidine-3'-phosphate
  modified_base 15: mod_base = OTHER; note = 2'-O-methylcytidine-3'-phosphate
  modified_base 16: mod_base = OTHER; note = 2'-deoxy-2'-fluoroadenosine-3'-phosphate
  modified_base 17: mod_base = OTHER; note = 2'-O-methyluridine-3'-phosphate
  modified_base 18: mod_base = OTHER; note = 2'-O-methyluridine-3'-phosphate
  modified_base 19: mod_base = OTHER; note = 2'-O-methyladenosine-3'-phosphate
  modified_base 20: mod_base = OTHER; note = 2'-O-methylcytidine-3'-phosphate
  modified_base 21: mod_base = OTHER; note = 2'-O-methyluridine-3'-phosphorothioate
  modified_base 22: mod_base = OTHER; note = 2'-O-methyluridine-3'-phosphorothioate
  modified_base 23: mod_base = OTHER; note = 2'-O-methyluridine
  misc_feature 1..4: note = RNA
  misc_feature 6..23: note = RNA
  misc_feature 5: note = DNA
aaccttcactggtccattacttt

SEQ ID NO: 1181 - RNA, 23 nt, synthetic construct
  source 1..23: mol_type = other RNA
  modified_base 1: mod_base = OTHER; note = 2'-O-methyladenosine-3'-phosphorothioate
  modified_base 2: mod_base = OTHER; note = 2'-deoxy-2'-fluorocytidine-3'-phosphorothioate
  modified_base 3: mod_base = OTHER; note = 2'-O-methyladenosine-3'-phosphate
  modified_base 4: mod_base = OTHER; note = 2'-O-methylcytidine-3'-phosphate
  modified_base 5: mod_base = OTHER; note = 2'-O-methylcytidine-3'-phosphate
  modified_base 6: mod_base = OTHER; note = 2'-deoxy-2'-fluorouridine-3'-phosphate
  modified_base 7: mod_base = OTHER; note = 2'-O-methyluridine-3'-phosphate
  modified_base 8: mod_base = OTHER; note = 2'-O-methylcytidine-3'-phosphate
  modified_base 9: mod_base = OTHER; note = 2'-O-methyladenosine-3'-phosphate
  modified_base 10: mod_base = OTHER; note = 2'-O-methylcytidine-3'-phosphate
  modified_base 11: mod_base = OTHER; note = 2'-O-methyluridine-3'-phosphate
  modified_base 12: mod_base = OTHER; note = 2'-O-methylguanosine-3'-phosphate
  modified_base 13: mod_base = OTHER; note = 2'-O-methylguanosine-3'-phosphate
  modified_base 14: mod_base = OTHER; note = 2'-deoxy-2'-fluorouridine-3'-phosphate
  modified_base 15: mod_base = OTHER; note = 2'-O-methylcytidine-3'-phosphate
  modified_base 16: mod_base = OTHER; note = 2'-deoxy-2'-fluorocytidine-3'-phosphate
  modified_base 17: mod_base = OTHER; note = 2'-O-methyladenosine-3'-phosphate
  modified_base 18: mod_base = OTHER; note = 2'-O-methyluridine-3'-phosphate
  modified_base 19: mod_base = OTHER; note = 2'-O-methyluridine-3'-phosphate
  modified_base 20: mod_base = OTHER; note = 2'-O-methyladenosine-3'-phosphate
  modified_base 21: mod_base = OTHER; note = 2'-O-methylcytidine-3'-phosphorothioate
  modified_base 22: mod_base = OTHER; note = 2'-O-methyluridine-3'-phosphorothioate
  modified_base 23: mod_base = OTHER; note = 2'-O-methyluridine
acaccttcactggtccattactt

SEQ ID NO: 1182 - RNA, 23 nt, synthetic construct
  source 1..23: mol_type = other RNA
  modified_base 1: mod_base = OTHER; note = 2'-O-methyladenosine-3'-phosphorothioate
  modified_base 2: mod_base = OTHER; note = 2'-deoxy-2'-fluoroadenosine-3'-phosphorothioate
  modified_base 3: mod_base = OTHER; note = 2'-O-methylcytidine-3'-phosphate
  modified_base 4: mod_base = OTHER; note = 2'-O-methyladenosine-3'-phosphate
  modified_base 5: mod_base = OTHER; note = 2'-O-methylcytidine-3'-phosphate
  modified_base 6: mod_base = OTHER; note = 2'-deoxy-2'-fluorocytidine-3'-phosphate
  modified_base 7: mod_base = OTHER; note = 2'-O-methyluridine-3'-phosphate
  modified_base 8: mod_base = OTHER; note = 2'-O-methyluridine-3'-phosphate
  modified_base 9: mod_base = OTHER; note = 2'-O-methylcytidine-3'-phosphate
  modified_base 10: mod_base = OTHER; note = 2'-O-methyladenosine-3'-phosphate
  modified_base 11: mod_base = OTHER; note = 2'-O-methylcytidine-3'-phosphate
  modified_base 12: mod_base = OTHER; note = 2'-O-methyluridine-3'-phosphate
  modified_base 13: mod_base = OTHER; note = 2'-O-methylguanosine-3'-phosphate
  modified_base 14: mod_base = OTHER; note = 2'-deoxy-2'-fluoroguanosine-3'-phosphate
  modified_base 15: mod_base = OTHER; note = 2'-O-methyluridine-3'-phosphate
  modified_base 16: mod_base = OTHER; note = 2'-deoxy-2'-fluorocytidine-3'-phosphate
  modified_base 17: mod_base = OTHER; note = 2'-O-methylcytidine-3'-phosphate
  modified_base 18: mod_base = OTHER; note = 2'-O-methyladenosine-3'-phosphate
  modified_base 19: mod_base = OTHER; note = 2'-O-methyluridine-3'-phosphate
  modified_base 20: mod_base = OTHER; note = 2'-O-methyluridine-3'-phosphate
  modified_base 21: mod_base = OTHER; note = 2'-O-methyladenosine-3'-phosphorothioate
  modified_base 22: mod_base = OTHER; note = 2'-O-methylcytidine-3'-phosphorothioate
  modified_base 23: mod_base = OTHER; note = 2'-O-methyluridine
aacaccttcactggtccattact

SEQ ID NO: 1183 - RNA, 23 nt, synthetic construct
  source 1..23: mol_type = other RNA
  modified_base 1: mod_base = OTHER; note = 2'-O-methyladenosine-3'-phosphorothioate
  modified_base 2: mod_base = OTHER; note = 2'-deoxy-2'-fluorocytidine-3'-phosphorothioate
  modified_base 3: mod_base = OTHER; note = 2'-O-methyladenosine-3'-phosphate
  modified_base 4: mod_base = OTHER; note = 2'-O-methylcytidine-3'-phosphate
  modified_base 5: mod_base = OTHER; note = 2'-O-methyladenosine-3'-phosphate
  modified_base 6: mod_base = OTHER; note = 2'-deoxy-2'-fluorocytidine-3'-phosphate
  modified_base 7: mod_base = OTHER; note = 2'-O-methylcytidine-3'-phosphate
  modified_base 8: mod_base = OTHER; note = 2'-O-methyluridine-3'-phosphate
  modified_base 9: mod_base = OTHER; note = 2'-O-methyluridine-3'-phosphate
  modified_base 10: mod_base = OTHER; note = 2'-O-methylcytidine-3'-phosphate
  modified_base 11: mod_base = OTHER; note = 2'-O-methyladenosine-3'-phosphate
  modified_base 12: mod_base = OTHER; note = 2'-O-methylcytidine-3'-phosphate
  modified_base 13: mod_base = OTHER; note = 2'-O-methyluridine-3'-phosphate
  modified_base 14: mod_base = OTHER; note = 2'-deoxy-2'-fluoroguanosine-3'-phosphate
  modified_base 15: mod_base = OTHER; note = 2'-O-methylguanosine-3'-phosphate
  modified_base 16: mod_base = OTHER; note = 2'-deoxy-2'-fluorouridine-3'-phosphate
  modified_base 17: mod_base = OTHER; note = 2'-O-methylcytidine-3'-phosphate
  modified_base 18: mod_base = OTHER; note = 2'-O-methylcytidine-3'-phosphate
  modified_base 19: mod_base = OTHER; note = 2'-O-methyladenosine-3'-phosphate
  modified_base 20: mod_base = OTHER; note = 2'-O-methyluridine-3'-phosphate
  modified_base 21: mod_base = OTHER; note = 2'-O-methyluridine-3'-phosphorothioate
  modified_base 22: mod_base = OTHER; note = 2'-O-methyladenosine-3'-phosphorothioate
  modified_base 23: mod_base = OTHER; note = 2'-O-methylcytidine
acacaccttcactggtccattac

SEQ ID NO: 1184 - DNA, 23 bp, synthetic construct
  source 1..23: mol_type = other DNA
  modified_base 1: mod_base = OTHER; note = 2'-O-methyladenosine-3'-phosphorothioate
  modified_base 2: mod_base = OTHER; note = 2'-deoxy-2'-fluoroguanosine-3'-phosphorothioate
  modified_base 3: mod_base = OTHER; note = 2'-O-methyluridine-3'-phosphate
  modified_base 4: mod_base = OTHER; note = 2'-O-methylguanosine-3'-phosphate
  modified_base 6: mod_base = OTHER; note = 2'-O-methylguanosine-3'-phosphate
  modified_base 7: mod_base = OTHER; note = guanosine-2'-phosphate
  modified_base 8: mod_base = OTHER; note = 2'-O-methyladenosine-3'-phosphate
  modified_base 9: mod_base = OTHER; note = 2'-O-methylcytidine-3'-phosphate
  modified_base 10: mod_base = OTHER; note = 2'-O-methylcytidine-3'-phosphate
  modified_base 11: mod_base = OTHER; note = 2'-O-methyluridine-3'-phosphate
  modified_base 12: mod_base = OTHER; note = 2'-O-methylguanosine-3'-phosphate
  modified_base 13: mod_base = OTHER; note = 2'-O-methylcytidine-3'-phosphate
  modified_base 14: mod_base = OTHER; note = 2'-deoxy-2'-fluoroadenosine-3'-phosphate
  modified_base 15: mod_base = OTHER; note = 2'-O-methylcytidine-3'-phosphate
  modified_base 16: mod_base = OTHER; note = 2'-deoxy-2'-fluorouridine-3'-phosphate
  modified_base 17: mod_base = OTHER; note = 2'-O-methylguanosine-3'-phosphate
  modified_base 18: mod_base = OTHER; note = 2'-O-methylguanosine-3'-phosphate
  modified_base 19: mod_base = OTHER; note = 2'-O-methyluridine-3'-phosphate
  modified_base 20: mod_base = OTHER; note = 2'-O-methyladenosine-3'-phosphate
  modified_base 21: mod_base = OTHER; note = 2'-O-methylcytidine-3'-phosphorothioate
  modified_base 22: mod_base = OTHER; note = 2'-O-methyladenosine-3'-phosphorothioate
  modified_base 23: mod_base = OTHER; note = 2'-O-methylguanosine
  misc_feature 1..4: note = RNA
  misc_feature 6..23: note = RNA
  misc_feature 5: note = DNA
agtgaggacctgcactggtacag

SEQ ID NO: 1185 - DNA, 23 bp, synthetic construct
  source 1..23: mol_type = other DNA
  modified_base 1: mod_base = OTHER; note = 2'-O-methyladenosine-3'-phosphorothioate
  modified_base 2: mod_base = OTHER; note = 2'-deoxy-2'-fluoroadenosine-3'-phosphorothioate
  modified_base 3: mod_base = OTHER; note = 2'-O-methylguanosine-3'-phosphate
  modified_base 4: mod_base = OTHER; note = 2'-O-methyluridine-3'-phosphate
  modified_base 6: mod_base = OTHER; note = 2'-O-methyladenosine-3'-phosphate
  modified_base 7: mod_base = OTHER; note = guanosine-2'-phosphate
  modified_base 8: mod_base = OTHER; note = 2'-O-methylguanosine-3'-phosphate
  modified_base 9: mod_base = OTHER; note = 2'-O-methyladenosine-3'-phosphate
  modified_base 10: mod_base = OTHER; note = 2'-O-methylcytidine-3'-phosphate
  modified_base 11: mod_base = OTHER; note = 2'-O-methylcytidine-3'-phosphate
  modified_base 12: mod_base = OTHER; note = 2'-O-methyluridine-3'-phosphate
  modified_base 13: mod_base = OTHER; note = 2'-O-methylguanosine-3'-phosphate
  modified_base 14: mod_base = OTHER; note = 2'-deoxy-2'-fluorocytidine-3'-phosphate
  modified_base 15: mod_base = OTHER; note = 2'-O-methyladenosine-3'-phosphate
  modified_base 16: mod_base = OTHER; note = 2'-deoxy-2'-fluorocytidine-3'-phosphate
  modified_base 17: mod_base = OTHER; note = 2'-O-methyluridine-3'-phosphate
  modified_base 18: mod_base = OTHER; note = 2'-O-methylguanosine-3'-phosphate
  modified_base 19: mod_base = OTHER; note = 2'-O-methylguanosine-3'-phosphate
  modified_base 20: mod_base = OTHER; note = 2'-O-methyluridine-3'-phosphate
  modified_base 21: mod_base = OTHER; note = 2'-O-methyladenosine-3'-phosphorothioate
  modified_base 22: mod_base = OTHER; note = 2'-O-methylcytidine-3'-phosphorothioate
  modified_base 23: mod_base = OTHER; note = 2'-O-methyladenosine
  misc_feature 1..4: note = RNA
  misc_feature 6..23: note = RNA
  misc_feature 5: note = DNA
aagtgaggacctgcactggtaca

SEQ ID NO: 1186 - DNA, 23 bp, synthetic construct
  source 1..23: mol_type = other DNA
  modified_base 1: mod_base = OTHER; note = 2'-O-methyladenosine-3'-phosphorothioate
  modified_base 2: mod_base = OTHER; note = 2'-deoxy-2'-fluoroadenosine-3'-phosphorothioate
  modified_base 3: mod_base = OTHER; note = 2'-O-methyladenosine-3'-phosphate
  modified_base 4: mod_base = OTHER; note = 2'-O-methylguanosine-3'-phosphate
  modified_base 6: mod_base = OTHER; note = 2'-O-methylguanosine-3'-phosphate
  modified_base 7: mod_base = OTHER; note = Adenosine-glycol nucleic acid (GNA), S-isomer
  modified_base 8: mod_base = OTHER; note = 2'-O-methylguanosine-3'-phosphate
  modified_base 9: mod_base = OTHER; note = 2'-O-methylguanosine-3'-phosphate
  modified_base 10: mod_base = OTHER; note = 2'-O-methyladenosine-3'-phosphate
  modified_base 11: mod_base = OTHER; note = 2'-O-methylcytidine-3'-phosphate
  modified_base 12: mod_base = OTHER; note = 2'-O-methylcytidine-3'-phosphate
  modified_base 13: mod_base = OTHER; note = 2'-O-methyluridine-3'-phosphate
  modified_base 14: mod_base = OTHER; note = 2'-deoxy-2'-fluoroguanosine-3'-phosphate
  modified_base 15: mod_base = OTHER; note = 2'-O-methylcytidine-3'-phosphate
  modified_base 16: mod_base = OTHER; note = 2'-deoxy-2'-fluoroadenosine-3'-phosphate
  modified_base 17: mod_base = OTHER; note = 2'-O-methylcytidine-3'-phosphate
  modified_base 18: mod_base = OTHER; note = 2'-O-methyluridine-3'-phosphate
  modified_base 19: mod_base = OTHER; note = 2'-O-methylguanosine-3'-phosphate
  modified_base 20: mod_base = OTHER; note = 2'-O-methylguanosine-3'-phosphate
  modified_base 21: mod_base = OTHER; note = 2'-O-methyluridine-3'-phosphorothioate
  modified_base 22: mod_base = OTHER; note = 2'-O-methyladenosine-3'-phosphorothioate
  modified_base 23: mod_base = OTHER; note = 2'-O-methylcytidine
  misc_feature 1..4: note = RNA
  misc_feature 6..23: note = RNA
  misc_feature 5: note = DNA
aaagtgaggacctgcactggtac

SEQ ID NO: 1187 - DNA, 23 bp, synthetic construct
  source 1..23: mol_type = other DNA
  modified_base 1: mod_base = OTHER; note = 2'-O-methyluridine-3'-phosphorothioate
  modified_base 2: mod_base = OTHER; note = 2'-deoxy-2'-fluoroadenosine-3'-phosphorothioate
  modified_base 3: mod_base = OTHER; note = 2'-O-methyladenosine-3'-phosphate
  modified_base 4: mod_base = OTHER; note = 2'-O-methyladenosine-3'-phosphate
  modified_base 6: mod_base = OTHER; note = 2'-O-methyluridine-3'-phosphate
  modified_base 7: mod_base = OTHER; note = guanosine-2'-phosphate
  modified_base 8: mod_base = OTHER; note = 2'-O-methyladenosine-3'-phosphate
  modified_base 9: mod_base = OTHER; note = 2'-O-methylguanosine-3'-phosphate
  modified_base 10: mod_base = OTHER; note = 2'-O-methylguanosine-3'-phosphate
  modified_base 11: mod_base = OTHER; note = 2'-O-methyladenosine-3'-phosphate
  modified_base 12: mod_base = OTHER; note = 2'-O-methylcytidine-3'-phosphate
  modified_base 13: mod_base = OTHER; note = 2'-O-methylcytidine-3'-phosphate
  modified_base 14: mod_base = OTHER; note = 2'-deoxy-2'-fluorouridine-3'-phosphate
  modified_base 15: mod_base = OTHER; note = 2'-O-methylguanosine-3'-phosphate
  modified_base 16: mod_base = OTHER; note = 2'-deoxy-2'-fluorocytidine-3'-phosphate
  modified_base 17: mod_base = OTHER; note = 2'-O-methyladenosine-3'-phosphate
  modified_base 18: mod_base = OTHER; note = 2'-O-methylcytidine-3'-phosphate
  modified_base 19: mod_base = OTHER; note = 2'-O-methyluridine-3'-phosphate
  modified_base 20: mod_base = OTHER; note = 2'-O-methylguanosine-3'-phosphate
  modified_base 21: mod_base = OTHER; note = 2'-O-methylguanosine-3'-phosphorothioate
  modified_base 22: mod_base = OTHER; note = 2'-O-methyluridine-3'-phosphorothioate
  modified_base 23: mod_base = OTHER; note = 2'-O-methyladenosine
  misc_feature 1..4: note = RNA
  misc_feature 6..23: note = RNA
  misc_feature 5: note = DNA
taaagtgaggacctgcactggta

SEQ ID NO: 1188 - DNA, 23 bp, synthetic construct
  source 1..23: mol_type = other DNA
  modified_base 1: mod_base = OTHER; note = 2'-O-methyluridine-3'-phosphorothioate
  modified_base 2: mod_base = OTHER; note = 2'-deoxy-2'-fluorouridine-3'-phosphorothioate
  modified_base 3: mod_base = OTHER; note = 2'-O-methyladenosine-3'-phosphate
  modified_base 4: mod_base = OTHER; note = 2'-O-methyladenosine-3'-phosphate
  modified_base 6: mod_base = OTHER; note = 2'-O-methylguanosine-3'-phosphate
  modified_base 7: mod_base = OTHER; note = Thymidine-glycol nucleic acid (GNA), S-Isomer
  modified_base 8: mod_base = OTHER; note = 2'-O-methylguanosine-3'-phosphate
  modified_base 9: mod_base = OTHER; note = 2'-O-methyladenosine-3'-phosphate
  modified_base 10: mod_base = OTHER; note = 2'-O-methylguanosine-3'-phosphate
  modified_base 11: mod_base = OTHER; note = 2'-O-methylguanosine-3'-phosphate
  modified_base 12: mod_base = OTHER; note = 2'-O-methyladenosine-3'-phosphate
  modified_base 13: mod_base = OTHER; note = 2'-O-methylcytidine-3'-phosphate
  modified_base 14: mod_base = OTHER; note = 2'-deoxy-2'-fluorocytidine-3'-phosphate
  modified_base 15: mod_base = OTHER; note = 2'-O-methyluridine-3'-phosphate
  modified_base 16: mod_base = OTHER; note = 2'-deoxy-2'-fluoroguanosine-3'-phosphate
  modified_base 17: mod_base = OTHER; note = 2'-O-methylcytidine-3'-phosphate
  modified_base 18: mod_base = OTHER; note = 2'-O-methyladenosine-3'-phosphate
  modified_base 19: mod_base = OTHER; note = 2'-O-methylcytidine-3'-phosphate
  modified_base 20: mod_base = OTHER; note = 2'-O-methyluridine-3'-phosphate
  modified_base 21: mod_base = OTHER; note = 2'-O-methylguanosine-3'-phosphorothioate
  modified_base 22: mod_base = OTHER; note = 2'-O-methylguanosine-3'-phosphorothioate
  modified_base 23: mod_base = OTHER; note = 2'-O-methyluridine
  misc_feature 1..4: note = RNA
  misc_feature 6..23: note = RNA
  misc_feature 5: note = DNA
ttaaagtgaggacctgcactggt

SEQ ID NO: 1189 - DNA, 23 bp, synthetic construct
  source 1..23: mol_type = other DNA
  modified_base 1: mod_base = OTHER; note = 2'-O-methyladenosine-3'-phosphorothioate
  modified_base 2: mod_base = OTHER; note = 2'-deoxy-2'-fluorouridine-3'-phosphorothioate
  modified_base 3: mod_base = OTHER; note = 2'-O-methyluridine-3'-phosphate
  modified_base 4: mod_base = OTHER; note = 2'-O-methyladenosine-3'-phosphate
  modified_base 6: mod_base = OTHER; note = 2'-O-methyladenosine-3'-phosphate
  modified_base 7: mod_base = OTHER; note = guanosine-2'-phosphate
  modified_base 8: mod_base = OTHER; note = 2'-O-methyluridine-3'-phosphate
  modified_base 9: mod_base = OTHER; note = 2'-O-methylguanosine-3'-phosphate
  modified_base 10: mod_base = OTHER; note = 2'-O-methyladenosine-3'-phosphate
  modified_base 11: mod_base = OTHER; note = 2'-O-methylguanosine-3'-phosphate
  modified_base 12: mod_base = OTHER; note = 2'-O-methylguanosine-3'-phosphate
  modified_base 13: mod_base = OTHER; note = 2'-O-methyladenosine-3'-phosphate
  modified_base 14: mod_base = OTHER; note = 2'-deoxy-2'-fluorocytidine-3'-phosphate
  modified_base 15: mod_base = OTHER; note = 2'-O-methylcytidine-3'-phosphate
  modified_base 16: mod_base = OTHER; note = 2'-deoxy-2'-fluorouridine-3'-phosphate
  modified_base 17: mod_base = OTHER; note = 2'-O-methylguanosine-3'-phosphate
  modified_base 18: mod_base = OTHER; note = 2'-O-methylcytidine-3'-phosphate
  modified_base 19: mod_base = OTHER; note = 2'-O-methyladenosine-3'-phosphate
  modified_base 20: mod_base = OTHER; note = 2'-O-methylcytidine-3'-phosphate
  modified_base 21: mod_base = OTHER; note = 2'-O-methyluridine-3'-phosphorothioate
  modified_base 22: mod_base = OTHER; note = 2'-O-methylguanosine-3'-phosphorothioate
  modified_base 23: mod_base = OTHER; note = 2'-O-methylguanosine
  misc_feature 1..4: note = RNA
  misc_feature 6..23: note = RNA
  misc_feature 5: note = DNA
attaaagtgaggacctgcactgg

SEQ ID NO: 1190 - RNA, 23 nt, synthetic construct
  source 1..23: mol_type = other RNA
  modified_base 1: mod_base = OTHER; note = 2'-O-methyladenosine-3'-phosphorothioate
  modified_base 2: mod_base = OTHER; note = 2'-deoxy-2'-fluoroadenosine-3'-phosphorothioate
  modified_base 3: mod_base = OTHER; note = 2'-O-methyluridine-3'-phosphate
  modified_base 4: mod_base = OTHER; note = 2'-O-methyluridine-3'-phosphate
  modified_base 5: mod_base = OTHER; note = 2'-O-methyladenosine-3'-phosphate
  modified_base 6: mod_base = OTHER; note = 2'-deoxy-2'-fluoroadenosine-3'-phosphate
  modified_base 7: mod_base = OTHER; note = 2'-O-methyladenosine-3'-phosphate
  modified_base 8: mod_base = OTHER; note = 2'-O-methylguanosine-3'-phosphate
  modified_base 9: mod_base = OTHER; note = 2'-O-methyluridine-3'-phosphate
  modified_base 10: mod_base = OTHER; note = 2'-O-methylguanosine-3'-phosphate
  modified_base 11: mod_base = OTHER; note = 2'-O-methyladenosine-3'-phosphate
  modified_base 12: mod_base = OTHER; note = 2'-O-methylguanosine-3'-phosphate
  modified_base 13: mod_base = OTHER; note = 2'-O-methylguanosine-3'-phosphate
  modified_base 14: mod_base = OTHER; note = 2'-deoxy-2'-fluoroadenosine-3'-phosphate
  modified_base 15: mod_base = OTHER; note = 2'-O-methylcytidine-3'-phosphate
  modified_base 16: mod_base = OTHER; note = 2'-deoxy-2'-fluorocytidine-3'-phosphate
  modified_base 17: mod_base = OTHER; note = 2'-O-methyluridine-3'-phosphate
  modified_base 18: mod_base = OTHER; note = 2'-O-methylguanosine-3'-phosphate
  modified_base 19: mod_base = OTHER; note = 2'-O-methylcytidine-3'-phosphate
  modified_base 20: mod_base = OTHER; note = 2'-O-methyladenosine-3'-phosphate
  modified_base 21: mod_base = OTHER; note = 2'-O-methylcytidine-3'-phosphorothioate
  modified_base 22: mod_base = OTHER; note = 2'-O-methyluridine-3'-phosphorothioate
  modified_base 23: mod_base = OTHER; note = 2'-O-methylguanosine
aattaaagtgaggacctgcactg

SEQ ID NO: 1191 - RNA, 23 nt, synthetic construct
  source 1..23: mol_type = other RNA
  modified_base 1: mod_base = OTHER; note = 2'-O-methyladenosine-3'-phosphorothioate
  modified_base 2: mod_base = OTHER; note = 2'-deoxy-2'-fluoroguanosine-3'-phosphorothioate
  modified_base 3: mod_base = OTHER; note = 2'-O-methyladenosine-3'-phosphate
  modified_base 4: mod_base = OTHER; note = 2'-O-methyluridine-3'-phosphate
  modified_base 5: mod_base = OTHER; note = 2'-O-methyluridine-3'-phosphate
  modified_base 6: mod_base = OTHER; note = 2'-deoxy-2'-fluoroadenosine-3'-phosphate
  modified_base 7: mod_base = OTHER; note = 2'-O-methyladenosine-3'-phosphate
  modified_base 8: mod_base = OTHER; note = 2'-O-methyladenosine-3'-phosphate
  modified_base 9: mod_base = OTHER; note = 2'-O-methylguanosine-3'-phosphate
  modified_base 10: mod_base = OTHER; note = 2'-O-methyluridine-3'-phosphate
  modified_base 11: mod_base = OTHER; note = 2'-O-methylguanosine-3'-phosphate
  modified_base 12: mod_base = OTHER; note = 2'-O-methyladenosine-3'-phosphate
  modified_base 13: mod_base = OTHER; note = 2'-O-methylguanosine-3'-phosphate
  modified_base 14: mod_base = OTHER; note = 2'-deoxy-2'-fluoroguanosine-3'-phosphate
  modified_base 15: mod_base = OTHER; note = 2'-O-methyladenosine-3'-phosphate
  modified_base 16: mod_base = OTHER; note = 2'-deoxy-2'-fluorocytidine-3'-phosphate
  modified_base 17: mod_base = OTHER; note = 2'-O-methylcytidine-3'-phosphate
  modified_base 18: mod_base = OTHER; note = 2'-O-methyluridine-3'-phosphate
  modified_base 19: mod_base = OTHER; note = 2'-O-methylguanosine-3'-phosphate
  modified_base 20: mod_base = OTHER; note = 2'-O-methylcytidine-3'-phosphate
  modified_base 21: mod_base = OTHER; note = 2'-O-methyladenosine-3'-phosphorothioate
  modified_base 22: mod_base = OTHER; note = 2'-O-methylcytidine-3'-phosphorothioate
  modified_base 23: mod_base = OTHER; note = 2'-O-methyluridine
agattaaagtgaggacctgcact

SEQ ID NO: 1192 - RNA, 23 nt, synthetic construct
  source 1..23: mol_type = other RNA
  modified_base 1: mod_base = OTHER; note = 2'-O-methyladenosine-3'-phosphorothioate
  modified_base 2: mod_base = OTHER; note = 2'-deoxy-2'-fluoroguanosine-3'-phosphorothioate
  modified_base 3: mod_base = OTHER; note = 2'-O-methylguanosine-3'-phosphate
  modified_base 4: mod_base = OTHER; note = 2'-O-methyladenosine-3'-phosphate
  modified_base 5: mod_base = OTHER; note = 2'-O-methyluridine-3'-phosphate
  modified_base 6: mod_base = OTHER; note = 2'-deoxy-2'-fluorouridine-3'-phosphate
  modified_base 7: mod_base = OTHER; note = 2'-O-methyladenosine-3'-phosphate
  modified_base 8: mod_base = OTHER; note = 2'-O-methyladenosine-3'-phosphate
  modified_base 9: mod_base = OTHER; note = 2'-O-methyladenosine-3'-phosphate
  modified_base 10: mod_base = OTHER; note = 2'-O-methylguanosine-3'-phosphate
  modified_base 11: mod_base = OTHER; note = 2'-O-methyluridine-3'-phosphate
  modified_base 12: mod_base = OTHER; note = 2'-O-methylguanosine-3'-phosphate
  modified_base 13: mod_base = OTHER; note = 2'-O-methyladenosine-3'-phosphate
  modified_base 14: mod_base = OTHER; note = 2'-deoxy-2'-fluoroguanosine-3'-phosphate
  modified_base 15: mod_base = OTHER; note = 2'-O-methylguanosine-3'-phosphate
  modified_base 16: mod_base = OTHER; note = 2'-deoxy-2'-fluoroadenosine-3'-phosphate
  modified_base 17: mod_base = OTHER; note = 2'-O-methylcytidine-3'-phosphate
  modified_base 18: mod_base = OTHER; note = 2'-O-methylcytidine-3'-phosphate
  modified_base 19: mod_base = OTHER; note = 2'-O-methyluridine-3'-phosphate
  modified_base 20: mod_base = OTHER; note = 2'-O-methylguanosine-3'-phosphate
  modified_base 21: mod_base = OTHER; note = 2'-O-methylcytidine-3'-phosphorothioate
  modified_base 22: mod_base = OTHER; note = 2'-O-methyladenosine-3'-phosphorothioate
  modified_base 23: mod_base = OTHER; note = 2'-O-methylcytidine
aggattaaagtgaggacctgcac

SEQ ID NO: 1193 - RNA, 23 nt, synthetic construct
  source 1..23: mol_type = other RNA
  modified_base 1: mod_base = OTHER; note = 2'-O-methyladenosine-3'-phosphorothioate
  modified_base 2: mod_base = OTHER; note = 2'-deoxy-2'-fluoroadenosine-3'-phosphorothioate
  modified_base 3: mod_base = OTHER; note = 2'-O-methylguanosine-3'-phosphate
  modified_base 4: mod_base = OTHER; note = 2'-O-methylguanosine-3'-phosphate
  modified_base 5: mod_base = OTHER; note = 2'-O-methyladenosine-3'-phosphate
  modified_base 6: mod_base = OTHER; note = 2'-deoxy-2'-fluorouridine-3'-phosphate
  modified_base 7: mod_base = OTHER; note = 2'-O-methyluridine-3'-phosphate
  modified_base 8: mod_base = OTHER; note = 2'-O-methyladenosine-3'-phosphate
  modified_base 9: mod_base = OTHER; note = 2'-O-methyladenosine-3'-phosphate
  modified_base 10: mod_base = OTHER; note = 2'-O-methyladenosine-3'-phosphate
  modified_base 11: mod_base = OTHER; note = 2'-O-methylguanosine-3'-phosphate
  modified_base 12: mod_base = OTHER; note = 2'-O-methyluridine-3'-phosphate
  modified_base 13: mod_base = OTHER; note = 2'-O-methylguanosine-3'-phosphate
  modified_base 14: mod_base = OTHER; note = 2'-deoxy-2'-fluoroadenosine-3'-phosphate
  modified_base 15: mod_base = OTHER; note = 2'-O-methylguanosine-3'-phosphate
  modified_base 16: mod_base = OTHER; note = 2'-deoxy-2'-fluoroguanosine-3'-phosphate
  modified_base 17: mod_base = OTHER; note = 2'-O-methyladenosine-3'-phosphate
  modified_base 18: mod_base = OTHER; note = 2'-O-methylcytidine-3'-phosphate
  modified_base 19: mod_base = OTHER; note = 2'-O-methylcytidine-3'-phosphate
  modified_base 20: mod_base = OTHER; note = 2'-O-methyluridine-3'-phosphate
  modified_base 21: mod_base = OTHER; note = 2'-O-methylguanosine-3'-phosphorothioate
  modified_base 22: mod_base = OTHER; note = 2'-O-methylcytidine-3'-phosphorothioate
  modified_base 23: mod_base = OTHER; note = 2'-O-methyladenosine
aaggattaaagtgaggacctgca

SEQ ID NO: 1194 - RNA, 23 nt, synthetic construct
  source 1..23: mol_type = other RNA
  modified_base 1: mod_base = OTHER; note = 2'-O-methyladenosine-3'-phosphorothioate
  modified_base 2: mod_base = OTHER; note = 2'-deoxy-2'-fluoroguanosine-3'-phosphorothioate
  modified_base 3: mod_base = OTHER; note = 2'-O-methyladenosine-3'-phosphate
  modified_base 4: mod_base = OTHER; note = 2'-O-methylguanosine-3'-phosphate
  modified_base 5: mod_base = OTHER; note = 2'-O-methylguanosine-3'-phosphate
  modified_base 6: mod_base = OTHER; note = 2'-deoxy-2'-fluoroadenosine-3'-phosphate
  modified_base 7: mod_base = OTHER; note = 2'-O-methyluridine-3'-phosphate
  modified_base 8: mod_base = OTHER; note = 2'-O-methyluridine-3'-phosphate
  modified_base 9: mod_base = OTHER; note = 2'-O-methyladenosine-3'-phosphate
  modified_base 10: mod_base = OTHER; note = 2'-O-methyladenosine-3'-phosphate
  modified_base 11: mod_base = OTHER; note = 2'-O-methyladenosine-3'-phosphate
  modified_base 12: mod_base = OTHER; note = 2'-O-methylguanosine-3'-phosphate
  modified_base 13: mod_base = OTHER; note = 2'-O-methyluridine-3'-phosphate
  modified_base 14: mod_base = OTHER; note = 2'-deoxy-2'-fluoroguanosine-3'-phosphate
  modified_base 15: mod_base = OTHER; note = 2'-O-methyladenosine-3'-phosphate
  modified_base 16: mod_base = OTHER; note = 2'-deoxy-2'-fluoroguanosine-3'-phosphate
  modified_base 17: mod_base = OTHER; note = 2'-O-methylguanosine-3'-phosphate
  modified_base 18: mod_base = OTHER; note = 2'-O-methyladenosine-3'-phosphate
  modified_base 19: mod_base = OTHER; note = 2'-O-methylcytidine-3'-phosphate
  modified_base 20: mod_base = OTHER; note = 2'-O-methylcytidine-3'-phosphate
  modified_base 21: mod_base = OTHER; note = 2'-O-methyluridine-3'-phosphorothioate
  modified_base 22: mod_base = OTHER; note = 2'-O-methylguanosine-3'-phosphorothioate
  modified_base 23: mod_base = OTHER; note = 2'-O-methylcytidine
agaggattaaagtgaggacctgc

SEQ ID NO: 1195 - DNA, 23 bp, synthetic construct
  source 1..23: mol_type = other DNA
  modified_base 1: mod_base = OTHER; note = 2'-O-methyluridine-3'-phosphorothioate
  modified_base 2: mod_base = OTHER; note = 2'-deoxy-2'-fluoroadenosine-3'-phosphorothioate
  modified_base 3: mod_base = OTHER; note = 2'-O-methylguanosine-3'-phosphate
  modified_base 4: mod_base = OTHER; note = 2'-O-methyladenosine-3'-phosphate
  modified_base 6: mod_base = OTHER; note = 2'-O-methylguanosine-3'-phosphate
  modified_base 7: mod_base = OTHER; note = Adenosine-glycol nucleic acid (GNA), S-isomer
  modified_base 8: mod_base = OTHER; note = 2'-O-methyluridine-3'-phosphate
  modified_base 9: mod_base = OTHER; note = 2'-O-methyluridine-3'-phosphate
  modified_base 10: mod_base = OTHER; note = 2'-O-methyladenosine-3'-phosphate
  modified_base 11: mod_base = OTHER; note = 2'-O-methyladenosine-3'-phosphate
  modified_base 12: mod_base = OTHER; note = 2'-O-methyladenosine-3'-phosphate
  modified_base 13: mod_base = OTHER; note = 2'-O-methylguanosine-3'-phosphate
  modified_base 14: mod_base = OTHER; note = 2'-deoxy-2'-fluorouridine-3'-phosphate
  modified_base 15: mod_base = OTHER; note = 2'-O-methylguanosine-3'-phosphate
  modified_base 16: mod_base = OTHER; note = 2'-deoxy-2'-fluoroadenosine-3'-phosphate
  modified_base 17: mod_base = OTHER; note = 2'-O-methylguanosine-3'-phosphate
  modified_base 18: mod_base = OTHER; note = 2'-O-methylguanosine-3'-phosphate
  modified_base 19: mod_base = OTHER; note = 2'-O-methyladenosine-3'-phosphate
  modified_base 20: mod_base = OTHER; note = 2'-O-methylcytidine-3'-phosphate
  modified_base 21: mod_base = OTHER; note = 2'-O-methylcytidine-3'-phosphorothioate
  modified_base 22: mod_base = OTHER; note = 2'-O-methyluridine-3'-phosphorothioate
  modified_base 23: mod_base = OTHER; note = 2'-O-methylguanosine
  misc_feature 1..4: note = RNA
  misc_feature 6..23: note = RNA
  misc_feature 5: note = DNA
tagaggattaaagtgaggacctg

SEQ ID NO: 1196 - DNA, 23 bp, synthetic construct
  source 1..23: mol_type = other DNA
  modified_base 1: mod_base = OTHER; note = 2'-O-methyladenosine-3'-phosphorothioate
  modified_base 2: mod_base = OTHER; note = 2'-deoxy-2'-fluorouridine-3'-phosphorothioate
  modified_base 3: mod_base = OTHER; note = 2'-O-methyladenosine-3'-phosphate
  modified_base 4: mod_base = OTHER; note = 2'-O-methylguanosine-3'-phosphate
  modified_base 6: mod_base = OTHER; note = 2'-O-methylguanosine-3'-phosphate
  modified_base 7: mod_base = OTHER; note = guanosine-2'-phosphate
  modified_base 8: mod_base = OTHER; note = 2'-O-methyladenosine-3'-phosphate
  modified_base 9: mod_base = OTHER; note = 2'-O-methyluridine-3'-phosphate
  modified_base 10: mod_base = OTHER; note = 2'-O-methyluridine-3'-phosphate
  modified_base 11: mod_base = OTHER; note = 2'-O-methyladenosine-3'-phosphate
  modified_base 12: mod_base = OTHER; note = 2'-O-methyladenosine-3'-phosphate
  modified_base 13: mod_base = OTHER; note = 2'-O-methyladenosine-3'-phosphate
  modified_base 14: mod_base = OTHER; note = 2'-deoxy-2'-fluoroguanosine-3'-phosphate
  modified_base 15: mod_base = OTHER; note = 2'-O-methyluridine-3'-phosphate
  modified_base 16: mod_base = OTHER; note = 2'-deoxy-2'-fluoroguanosine-3'-phosphate
  modified_base 17: mod_base = OTHER; note = 2'-O-methyladenosine-3'-phosphate
  modified_base 18: mod_base = OTHER; note = 2'-O-methylguanosine-3'-phosphate
  modified_base 19: mod_base = OTHER; note = 2'-O-methylguanosine-3'-phosphate
  modified_base 20: mod_base = OTHER; note = 2'-O-methyladenosine-3'-phosphate
  modified_base 21: mod_base = OTHER; note = 2'-O-methylcytidine-3'-phosphorothioate
  modified_base 22: mod_base = OTHER; note = 2'-O-methylcytidine-3'-phosphorothioate
  modified_base 23: mod_base = OTHER; note = 2'-O-methyluridine
  misc_feature 1..4: note = RNA
  misc_feature 6..23: note = RNA
  misc_feature 5: note = DNA
atagaggattaaagtgaggacct

SEQ ID NO: 1197 - DNA, 23 bp, synthetic construct
  source 1..23: mol_type = other DNA
  modified_base 1: mod_base = OTHER; note = 2'-O-methyladenosine-3'-phosphorothioate
  modified_base 2: mod_base = OTHER; note = 2'-deoxy-2'-fluoroadenosine-3'-phosphorothioate
  modified_base 3: mod_base = OTHER; note = 2'-O-methyluridine-3'-phosphate
  modified_base 4: mod_base = OTHER; note = 2'-O-methyladenosine-3'-phosphate
  modified_base 6: mod_base = OTHER; note = 2'-O-methyladenosine-3'-phosphate
  modified_base 7: mod_base = OTHER; note = guanosine-2'-phosphate
  modified_base 8: mod_base = OTHER; note = 2'-O-methylguanosine-3'-phosphate
  modified_base 9: mod_base = OTHER; note = 2'-O-methyladenosine-3'-phosphate
  modified_base 10: mod_base = OTHER; note = 2'-O-methyluridine-3'-phosphate
  modified_base 11: mod_base = OTHER; note = 2'-O-methyluridine-3'-phosphate
  modified_base 12: mod_base = OTHER; note = 2'-O-methyladenosine-3'-phosphate
  modified_base 13: mod_base = OTHER; note = 2'-O-methyladenosine-3'-phosphate
  modified_base 14: mod_base = OTHER; note = 2'-deoxy-2'-fluoroadenosine-3'-phosphate
  modified_base 15: mod_base = OTHER; note = 2'-O-methylguanosine-3'-phosphate
  modified_base 16: mod_base = OTHER; note = 2'-deoxy-2'-fluorouridine-3'-phosphate
  modified_base 17: mod_base = OTHER; note = 2'-O-methylguanosine-3'-phosphate
  modified_base 18: mod_base = OTHER; note = 2'-O-methyladenosine-3'-phosphate
  modified_base 19: mod_base = OTHER; note = 2'-O-methylguanosine-3'-phosphate
  modified_base 20: mod_base = OTHER; note = 2'-O-methylguanosine-3'-phosphate
  modified_base 21: mod_base = OTHER; note = 2'-O-methyladenosine-3'-phosphorothioate
  modified_base 22: mod_base = OTHER; note = 2'-O-methylcytidine-3'-phosphorothioate
  modified_base 23: mod_base = OTHER; note = 2'-O-methylcytidine
  misc_feature 1..4: note = RNA
  misc_feature 6..23: note = RNA
  misc_feature 5: note = DNA
aatagaggattaaagtgaggacc

SEQ ID NO: 1198 - DNA, 23 bp, synthetic construct
  source 1..23: mol_type = other DNA
  modified_base 1: mod_base = OTHER; note = 2'-O-methyladenosine-3'-phosphorothioate
  modified_base 2: mod_base = OTHER; note = 2'-deoxy-2'-fluoroguanosine-3'-phosphorothioate
  modified_base 3: mod_base = OTHER; note = 2'-O-methyladenosine-3'-phosphate
  modified_base 4: mod_base = OTHER; note = 2'-O-methyluridine-3'-phosphate
  modified_base 6: mod_base = OTHER; note = 2'-O-methylguanosine-3'-phosphate
  modified_base 7: mod_base = OTHER; note = Adenosine-glycol nucleic acid (GNA), S-isomer
  modified_base 8: mod_base = OTHER; note = 2'-O-methylguanosine-3'-phosphate
  modified_base 9: mod_base = OTHER; note = 2'-O-methylguanosine-3'-phosphate
  modified_base 10: mod_base = OTHER; note = 2'-O-methyladenosine-3'-phosphate
  modified_base 11: mod_base = OTHER; note = 2'-O-methyluridine-3'-phosphate
  modified_base 12: mod_base = OTHER; note = 2'-O-methyluridine-3'-phosphate
  modified_base 13: mod_base = OTHER; note = 2'-O-methyladenosine-3'-phosphate
  modified_base 14: mod_base = OTHER; note = 2'-deoxy-2'-fluoroadenosine-3'-phosphate
  modified_base 15: mod_base = OTHER; note = 2'-O-methyladenosine-3'-phosphate
  modified_base 16: mod_base = OTHER; note = 2'-deoxy-2'-fluoroguanosine-3'-phosphate
  modified_base 17: mod_base = OTHER; note = 2'-O-methyluridine-3'-phosphate
  modified_base 18: mod_base = OTHER; note = 2'-O-methylguanosine-3'-phosphate
  modified_base 19: mod_base = OTHER; note = 2'-O-methyladenosine-3'-phosphate
  modified_base 20: mod_base = OTHER; note = 2'-O-methylguanosine-3'-phosphate
  modified_base 21: mod_base = OTHER; note = 2'-O-methylguanosine-3'-phosphorothioate
  modified_base 22: mod_base = OTHER; note = 2'-O-methyladenosine-3'-phosphorothioate
  modified_base 23: mod_base = OTHER; note = 2'-O-methylcytidine
  misc_feature 1..4: note = RNA
  misc_feature 6..23: note = RNA
  misc_feature 5: note = DNA
agatagaggattaaagtgaggac

SEQ ID NO: 1199 - RNA, 23 nt, synthetic construct
  source 1..23: mol_type = other RNA
  modified_base 1: mod_base = OTHER; note = 2'-O-methyladenosine-3'-phosphorothioate
  modified_base 2: mod_base = OTHER; note = 2'-deoxy-2'-fluoroguanosine-3'-phosphorothioate
  modified_base 3: mod_base = OTHER; note = 2'-O-methylguanosine-3'-phosphate
  modified_base 4: mod_base = OTHER; note = 2'-O-methyladenosine-3'-phosphate
  modified_base 5: mod_base = OTHER; note = 2'-O-methyluridine-3'-phosphate
  modified_base 6: mod_base = OTHER; note = 2'-deoxy-2'-fluoroadenosine-3'-phosphate
  modified_base 7: mod_base = OTHER; note = 2'-O-methylguanosine-3'-phosphate
  modified_base 8: mod_base = OTHER; note = 2'-O-methyladenosine-3'-phosphate
  modified_base 9: mod_base = OTHER; note = 2'-O-methylguanosine-3'-phosphate
  modified_base 10: mod_base = OTHER; note = 2'-O-methylguanosine-3'-phosphate
  modified_base 11: mod_base = OTHER; note = 2'-O-methyladenosine-3'-phosphate
  modified_base 12: mod_base = OTHER; note = 2'-O-methyluridine-3'-phosphate
  modified_base 13: mod_base = OTHER; note = 2'-O-methyluridine-3'-phosphate
  modified_base 14: mod_base = OTHER; note = 2'-deoxy-2'-fluoroadenosine-3'-phosphate
  modified_base 15: mod_base = OTHER; note = 2'-O-methyladenosine-3'-phosphate
  modified_base 16: mod_base = OTHER; note = 2'-deoxy-2'-fluoroadenosine-3'-phosphate
  modified_base 17: mod_base = OTHER; note = 2'-O-methylguanosine-3'-phosphate
  modified_base 18: mod_base = OTHER; note = 2'-O-methyluridine-3'-phosphate
  modified_base 19: mod_base = OTHER; note = 2'-O-methylguanosine-3'-phosphate
  modified_base 20: mod_base = OTHER; note = 2'-O-methyladenosine-3'-phosphate
  modified_base 21: mod_base = OTHER; note = 2'-O-methylguanosine-3'-phosphorothioate
  modified_base 22: mod_base = OTHER; note = 2'-O-methylguanosine-3'-phosphorothioate
  modified_base 23: mod_base = OTHER; note = 2'-O-methyladenosine
aggatagaggattaaagtgagga

SEQ ID NO: 1200 - RNA, 23 nt, synthetic construct
  source 1..23: mol_type = other RNA
  modified_base 1: mod_base = OTHER; note = 2'-O-methyladenosine-3'-phosphorothioate
  modified_base 2: mod_base = OTHER; note = 2'-deoxy-2'-fluorouridine-3'-phosphorothioate
  modified_base 3: mod_base = OTHER; note = 2'-O-methylguanosine-3'-phosphate
  modified_base 4: mod_base = OTHER; note = 2'-O-methylguanosine-3'-phosphate
  modified_base 5: mod_base = OTHER; note = 2'-O-methyladenosine-3'-phosphate
  modified_base 6: mod_base = OTHER; note = 2'-deoxy-2'-fluorouridine-3'-phosphate
  modified_base 7: mod_base = OTHER; note = 2'-O-methyladenosine-3'-phosphate
  modified_base 8: mod_base = OTHER; note = 2'-O-methylguanosine-3'-phosphate
  modified_base 9: mod_base = OTHER; note = 2'-O-methyladenosine-3'-phosphate
  modified_base 10: mod_base = OTHER; note = 2'-O-methylguanosine-3'-phosphate
  modified_base 11: mod_base = OTHER; note = 2'-O-methylguanosine-3'-phosphate
  modified_base 12: mod_base = OTHER; note = 2'-O-methyladenosine-3'-phosphate
  modified_base 13: mod_base = OTHER; note = 2'-O-methyluridine-3'-phosphate
  modified_base 14: mod_base = OTHER; note = 2'-deoxy-2'-fluorouridine-3'-phosphate
  modified_base 15: mod_base = OTHER; note = 2'-O-methyladenosine-3'-phosphate
  modified_base 16: mod_base = OTHER; note = 2'-deoxy-2'-fluoroadenosine-3'-phosphate
  modified_base 17: mod_base = OTHER; note = 2'-O-methyladenosine-3'-phosphate
  modified_base 18: mod_base = OTHER; note = 2'-O-methylguanosine-3'-phosphate
  modified_base 19: mod_base = OTHER; note = 2'-O-methyluridine-3'-phosphate
  modified_base 20: mod_base = OTHER; note = 2'-O-methylguanosine-3'-phosphate
  modified_base 21: mod_base = OTHER; note = 2'-O-methyladenosine-3'-phosphorothioate
  modified_base 22: mod_base = OTHER; note = 2'-O-methylguanosine-3'-phosphorothioate
  modified_base 23: mod_base = OTHER; note = 2'-O-methylguanosine
atggatagaggattaaagtgagg

SEQ ID NO: 1201 - RNA, 23 nt, synthetic construct
  source 1..23: mol_type = other RNA
  modified_base 1: mod_base = OTHER; note = 2'-O-methyladenosine-3'-phosphorothioate
  modified_base 2: mod_base = OTHER; note = 2'-deoxy-2'-fluorocytidine-3'-phosphorothioate
  modified_base 3: mod_base = OTHER; note = 2'-O-methyluridine-3'-phosphate
  modified_base 4: mod_base = OTHER; note = 2'-O-methylguanosine-3'-phosphate
  modified_base 5: mod_base = OTHER; note = 2'-O-methylguanosine-3'-phosphate
  modified_base 6: mod_base = OTHER; note = 2'-deoxy-2'-fluoroadenosine-3'-phosphate
  modified_base 7: mod_base = OTHER; note = 2'-O-methyluridine-3'-phosphate
  modified_base 8: mod_base = OTHER; note = 2'-O-methyladenosine-3'-phosphate
  modified_base 9: mod_base = OTHER; note = 2'-O-methylguanosine-3'-phosphate
  modified_base 10: mod_base = OTHER; note = 2'-O-methyladenosine-3'-phosphate
  modified_base 11: mod_base = OTHER; note = 2'-O-methylguanosine-3'-phosphate
  modified_base 12: mod_base = OTHER; note = 2'-O-methylguanosine-3'-phosphate
  modified_base 13: mod_base = OTHER; note = 2'-O-methyladenosine-3'-phosphate
  modified_base 14: mod_base = OTHER; note = 2'-deoxy-2'-fluorouridine-3'-phosphate
  modified_base 15: mod_base = OTHER; note = 2'-O-methyluridine-3'-phosphate
  modified_base 16: mod_base = OTHER; note = 2'-deoxy-2'-fluoroadenosine-3'-phosphate
  modified_base 17: mod_base = OTHER; note = 2'-O-methyladenosine-3'-phosphate
  modified_base 18: mod_base = OTHER; note = 2'-O-methyladenosine-3'-phosphate
  modified_base 19: mod_base = OTHER; note = 2'-O-methylguanosine-3'-phosphate
  modified_base 20: mod_base = OTHER; note = 2'-O-methyluridine-3'-phosphate
  modified_base 21: mod_base = OTHER; note = 2'-O-methylguanosine-3'-phosphorothioate
  modified_base 22: mod_base = OTHER; note = 2'-O-methyladenosine-3'-phosphorothioate
  modified_base 23: mod_base = OTHER; note = 2'-O-methylguanosine
actggatagaggattaaagtgag

SEQ ID NO: 1202 - DNA, 23 bp, synthetic construct
  source 1..23: mol_type = other DNA
  modified_base 1: mod_base = OTHER; note = 2'-O-methyluridine-3'-phosphorothioate
  modified_base 2: mod_base = OTHER; note = 2'-deoxy-2'-fluorouridine-3'-phosphorothioate
  modified_base 3: mod_base = OTHER; note = 2'-O-methylcytidine-3'-phosphate
  modified_base 4: mod_base = OTHER; note = 2'-O-methyluridine-3'-phosphate
  modified_base 6: mod_base = OTHER; note = 2'-O-methylguanosine-3'-phosphate
  modified_base 7: mod_base = OTHER; note = Adenosine-glycol nucleic acid (GNA), S-isomer
  modified_base 8: mod_base = OTHER; note = 2'-O-methyluridine-3'-phosphate
  modified_base 9: mod_base = OTHER; note = 2'-O-methyladenosine-3'-phosphate
  modified_base 10: mod_base = OTHER; note = 2'-O-methylguanosine-3'-phosphate
  modified_base 11: mod_base = OTHER; note = 2'-O-methyladenosine-3'-phosphate
  modified_base 12: mod_base = OTHER; note = 2'-O-methylguanosine-3'-phosphate
  modified_base 13: mod_base = OTHER; note = 2'-O-methylguanosine-3'-phosphate
  modified_base 14: mod_base = OTHER; note = 2'-deoxy-2'-fluoroadenosine-3'-phosphate
  modified_base 15: mod_base = OTHER; note = 2'-O-methyluridine-3'-phosphate
  modified_base 16: mod_base = OTHER; note = 2'-deoxy-2'-fluorouridine-3'-phosphate
  modified_base 17: mod_base = OTHER; note = 2'-O-methyladenosine-3'-phosphate
  modified_base 18: mod_base = OTHER; note = 2'-O-methyladenosine-3'-phosphate
  modified_base 19: mod_base = OTHER; note = 2'-O-methyladenosine-3'-phosphate
  modified_base 20: mod_base = OTHER; note = 2'-O-methylguanosine-3'-phosphate
  modified_base 21: mod_base = OTHER; note = 2'-O-methyluridine-3'-phosphorothioate
  modified_base 22: mod_base = OTHER; note = 2'-O-methylguanosine-3'-phosphorothioate
  modified_base 23: mod_base = OTHER; note = 2'-O-methyladenosine
  misc_feature 1..4: note = RNA
  misc_feature 6..23: note = RNA
  misc_feature 5: note = DNA
ttctggatagaggattaaagtga

SEQ ID NO: 1203 - DNA, 23 bp, synthetic construct
  source 1..23: mol_type = other DNA
  modified_base 1: mod_base = OTHER; note = 2'-O-methyluridine-3'-phosphorothioate
  modified_base 2: mod_base = OTHER; note = 2'-deoxy-2'-fluorocytidine-3'-phosphorothioate
  modified_base 3: mod_base = OTHER; note = 2'-O-methyluridine-3'-phosphate
  modified_base 4: mod_base = OTHER; note = 2'-O-methylcytidine-3'-phosphate
  modified_base 6: mod_base = OTHER; note = 2'-O-methyluridine-3'-phosphate
  modified_base 7: mod_base = OTHER; note = cytidine-2'-phosphate
  modified_base 8: mod_base = OTHER; note = 2'-O-methyladenosine-3'-phosphate
  modified_base 9: mod_base = OTHER; note = 2'-O-methyluridine-3'-phosphate
  modified_base 10: mod_base = OTHER; note = 2'-O-methylcytidine-3'-phosphate
  modified_base 11: mod_base = OTHER; note = 2'-O-methylcytidine-3'-phosphate
  modified_base 12: mod_base = OTHER; note = 2'-O-methyluridine-3'-phosphate
  modified_base 13: mod_base = OTHER; note = 2'-O-methyluridine-3'-phosphate
  modified_base 14: mod_base = OTHER; note = 2'-deoxy-2'-fluorouridine-3'-phosphate
  modified_base 15: mod_base = OTHER; note = 2'-O-methylguanosine-3'-phosphate
  modified_base 16: mod_base = OTHER; note = 2'-deoxy-2'-fluoroguanosine-3'-phosphate
  modified_base 17: mod_base = OTHER; note = 2'-O-methylcytidine-3'-phosphate
  modified_base 18: mod_base = OTHER; note = 2'-O-methylcytidine-3'-phosphate
  modified_base 19: mod_base = OTHER; note = 2'-O-methylcytidine-3'-phosphate
  modified_base 20: mod_base = OTHER; note = 2'-O-methyladenosine-3'-phosphate
  modified_base 21: mod_base = OTHER; note = 2'-O-methylcytidine-3'-phosphorothioate
  modified_base 22: mod_base = OTHER; note = 2'-O-methylcytidine-3'-phosphorothioate
  modified_base 23: mod_base = OTHER; note = 2'-O-methylguanosine
  misc_feature 1..4: note = RNA
  misc_feature 6..23: note = RNA
  misc_feature 5: note = DNA
tctcttcatcctttggcccaccg

SEQ ID NO: 1204 - DNA, 23 bp, synthetic construct
  source 1..23: mol_type = other DNA
  modified_base 1: mod_base = OTHER; note = 2'-O-methyladenosine-3'-phosphorothioate
  modified_base 2: mod_base = OTHER; note = 2'-deoxy-2'-fluorouridine-3'-phosphorothioate
  modified_base 3: mod_base = OTHER; note = 2'-O-methylcytidine-3'-phosphate
  modified_base 4: mod_base = OTHER; note = 2'-O-methyluridine-3'-phosphate
  modified_base 6: mod_base = OTHER; note = 2'-O-methyluridine-3'-phosphate
  modified_base 7: mod_base = OTHER; note = Thymidine-glycol nucleic acid (GNA), S-Isomer
  modified_base 8: mod_base = OTHER; note = 2'-O-methylcytidine-3'-phosphate
  modified_base 9: mod_base = OTHER; note = 2'-O-methyladenosine-3'-phosphate
  modified_base 10: mod_base = OTHER; note = 2'-O-methyluridine-3'-phosphate
  modified_base 11: mod_base = OTHER; note = 2'-O-methylcytidine-3'-phosphate
  modified_base 12: mod_base = OTHER; note = 2'-O-methylcytidine-3'-phosphate
  modified_base 13: mod_base = OTHER; note = 2'-O-methyluridine-3'-phosphate
  modified_base 14: mod_base = OTHER; note = 2'-deoxy-2'-fluorouridine-3'-phosphate
  modified_base 15: mod_base = OTHER; note = 2'-O-methyluridine-3'-phosphate
  modified_base 16: mod_base = OTHER; note = 2'-deoxy-2'-fluoroguanosine-3'-phosphate
  modified_base 17: mod_base = OTHER; note = 2'-O-methylguanosine-3'-phosphate
  modified_base 18: mod_base = OTHER; note = 2'-O-methylcytidine-3'-phosphate
  modified_base 19: mod_base = OTHER; note = 2'-O-methylcytidine-3'-phosphate
  modified_base 20: mod_base = OTHER; note = 2'-O-methylcytidine-3'-phosphate
  modified_base 21: mod_base = OTHER; note = 2'-O-methyladenosine-3'-phosphorothioate
  modified_base 22: mod_base = OTHER; note = 2'-O-methylcytidine-3'-phosphorothioate
  modified_base 23: mod_base = OTHER; note = 2'-O-methylcytidine
  misc_feature 1..4: note = RNA
  misc_feature 6..23: note = RNA
  misc_feature 5: note = DNA
atctcttcatcctttggcccacc

SEQ ID NO: 1205 - DNA, 23 bp, synthetic construct
  source 1..23: mol_type = other DNA
  modified_base 1: mod_base = OTHER; note = 2'-O-methyladenosine-3'-phosphorothioate
  modified_base 2: mod_base = OTHER; note = 2'-deoxy-2'-fluorocytidine-3'-phosphorothioate
  modified_base 3: mod_base = OTHER; note = 2'-O-methyluridine-3'-phosphate
  modified_base 4: mod_base = OTHER; note = 2'-O-methylcytidine-3'-phosphate
  modified_base 6: mod_base = OTHER; note = 2'-O-methylcytidine-3'-phosphate
  modified_base 7: mod_base = OTHER; note = Thymidine-glycol nucleic acid (GNA), S-Isomer
  modified_base 8: mod_base = OTHER; note = 2'-O-methyluridine-3'-phosphate
  modified_base 9: mod_base = OTHER; note = 2'-O-methylcytidine-3'-phosphate
  modified_base 10: mod_base = OTHER; note = 2'-O-methyladenosine-3'-phosphate
  modified_base 11: mod_base = OTHER; note = 2'-O-methyluridine-3'-phosphate
  modified_base 12: mod_base = OTHER; note = 2'-O-methylcytidine-3'-phosphate
  modified_base 13: mod_base = OTHER; note = 2'-O-methylcytidine-3'-phosphate
  modified_base 14: mod_base = OTHER; note = 2'-deoxy-2'-fluorouridine-3'-phosphate
  modified_base 15: mod_base = OTHER; note = 2'-O-methyluridine-3'-phosphate
  modified_base 16: mod_base = OTHER; note = 2'-deoxy-2'-fluorouridine-3'-phosphate
  modified_base 17: mod_base = OTHER; note = 2'-O-methylguanosine-3'-phosphate
  modified_base 18: mod_base = OTHER; note = 2'-O-methylguanosine-3'-phosphate
  modified_base 19: mod_base = OTHER; note = 2'-O-methylcytidine-3'-phosphate
  modified_base 20: mod_base = OTHER; note = 2'-O-methylcytidine-3'-phosphate
  modified_base 21: mod_base = OTHER; note = 2'-O-methylcytidine-3'-phosphorothioate
  modified_base 22: mod_base = OTHER; note = 2'-O-methyladenosine-3'-phosphorothioate
  modified_base 23: mod_base = OTHER; note = 2'-O-methylcytidine
  misc_feature 1..4: note = RNA
  misc_feature 6..23: note = RNA
  misc_feature 5: note = DNA
actctcttcatcctttggcccac

SEQ ID NO: 1206 - DNA, 23 bp, synthetic construct
  source 1..23: mol_type = other DNA
  modified_base 1: mod_base = OTHER; note = 2'-O-methyladenosine-3'-phosphorothioate
  modified_base 2: mod_base = OTHER; note = 2'-deoxy-2'-fluorocytidine-3'-phosphorothioate
  modified_base 3: mod_base = OTHER; note = 2'-O-methylcytidine-3'-phosphate
  modified_base 4: mod_base = OTHER; note = 2'-O-methyluridine-3'-phosphate
  modified_base 6: mod_base = OTHER; note = 2'-O-methyluridine-3'-phosphate
  modified_base 7: mod_base = OTHER; note = cytidine-2'-phosphate
  modified_base 8: mod_base = OTHER; note = 2'-O-methyluridine-3'-phosphate
  modified_base 9: mod_base = OTHER; note = 2'-O-methyluridine-3'-phosphate
  modified_base 10: mod_base = OTHER; note = 2'-O-methylcytidine-3'-phosphate
  modified_base 11: mod_base = OTHER; note = 2'-O-methyladenosine-3'-phosphate
  modified_base 12: mod_base = OTHER; note = 2'-O-methyluridine-3'-phosphate
  modified_base 13: mod_base = OTHER; note = 2'-O-methylcytidine-3'-phosphate
  modified_base 14: mod_base = OTHER; note = 2'-deoxy-2'-fluorocytidine-3'-phosphate
  modified_base 15: mod_base = OTHER; note = 2'-O-methyluridine-3'-phosphate
  modified_base 16: mod_base = OTHER; note = 2'-deoxy-2'-fluorouridine-3'-phosphate
  modified_base 17: mod_base = OTHER; note = 2'-O-methyluridine-3'-phosphate
  modified_base 18: mod_base = OTHER; note = 2'-O-methylguanosine-3'-phosphate
  modified_base 19: mod_base = OTHER; note = 2'-O-methylguanosine-3'-phosphate
  modified_base 20: mod_base = OTHER; note = 2'-O-methylcytidine-3'-phosphate
  modified_base 21: mod_base = OTHER; note = 2'-O-methylcytidine-3'-phosphorothioate
  modified_base 22: mod_base = OTHER; note = 2'-O-methylcytidine-3'-phosphorothioate
  modified_base 23: mod_base = OTHER; note = 2'-O-methyladenosine
  misc_feature 1..4: note = RNA
  misc_feature 6..23: note = RNA
  misc_feature 5: note = DNA
acctctcttcatcctttggccca

SEQ ID NO: 1207 - DNA, 23 bp, synthetic construct
  source 1..23: mol_type = other DNA
  modified_base 1: mod_base = OTHER; note = 2'-O-methyluridine-3'-phosphorothioate
  modified_base 2: mod_base = OTHER; note = 2'-deoxy-2'-fluoroguanosine-3'-phosphorothioate
  modified_base 3: mod_base = OTHER; note = 2'-O-methylcytidine-3'-phosphate
  modified_base 4: mod_base = OTHER; note = 2'-O-methylcytidine-3'-phosphate
  modified_base 6: mod_base = OTHER; note = 2'-O-methylcytidine-3'-phosphate
  modified_base 7: mod_base = OTHER; note = Thymidine-glycol nucleic acid (GNA), S-Isomer
  modified_base 8: mod_base = OTHER; note = 2'-O-methylcytidine-3'-phosphate
  modified_base 9: mod_base = OTHER; note = 2'-O-methyluridine-3'-phosphate
  modified_base 10: mod_base = OTHER; note = 2'-O-methyluridine-3'-phosphate
  modified_base 11: mod_base = OTHER; note = 2'-O-methylcytidine-3'-phosphate
  modified_base 12: mod_base = OTHER; note = 2'-O-methyladenosine-3'-phosphate
  modified_base 13: mod_base = OTHER; note = 2'-O-methyluridine-3'-phosphate
  modified_base 14: mod_base = OTHER; note = 2'-deoxy-2'-fluorocytidine-3'-phosphate
  modified_base 15: mod_base = OTHER; note = 2'-O-methylcytidine-3'-phosphate
  modified_base 16: mod_base = OTHER; note = 2'-deoxy-2'-fluorouridine-3'-phosphate
  modified_base 17: mod_base = OTHER; note = 2'-O-methyluridine-3'-phosphate
  modified_base 18: mod_base = OTHER; note = 2'-O-methyluridine-3'-phosphate
  modified_base 19: mod_base = OTHER; note = 2'-O-methylguanosine-3'-phosphate
  modified_base 20: mod_base = OTHER; note = 2'-O-methylguanosine-3'-phosphate
  modified_base 21: mod_base = OTHER; note = 2'-O-methylcytidine-3'-phosphorothioate
  modified_base 22: mod_base = OTHER; note = 2'-O-methylcytidine-3'-phosphorothioate
  modified_base 23: mod_base = OTHER; note = 2'-O-methylcytidine
  misc_feature 1..4: note = RNA
  misc_feature 6..23: note = RNA
  misc_feature 5: note = DNA
tgcctctcttcatcctttggccc

SEQ ID NO: 1208 - DNA, 23 bp, synthetic construct
  source 1..23: mol_type = other DNA
  modified_base 1: mod_base = OTHER; note = 2'-O-methyladenosine-3'-phosphorothioate
  modified_base 2: mod_base = OTHER; note = 2'-deoxy-2'-fluorouridine-3'-phosphorothioate
  modified_base 3: mod_base = OTHER; note = 2'-O-methylguanosine-3'-phosphate
  modified_base 4: mod_base = OTHER; note = 2'-O-methylcytidine-3'-phosphate
  modified_base 6: mod_base = OTHER; note = 2'-O-methyluridine-3'-phosphate
  modified_base 7: mod_base = OTHER; note = cytidine-2'-phosphate
  modified_base 8: mod_base = OTHER; note = 2'-O-methyluridine-3'-phosphate
  modified_base 9: mod_base = OTHER; note = 2'-O-methylcytidine-3'-phosphate
  modified_base 10: mod_base = OTHER; note = 2'-O-methyluridine-3'-phosphate
  modified_base 11: mod_base = OTHER; note = 2'-O-methyluridine-3'-phosphate
  modified_base 12: mod_base = OTHER; note = 2'-O-methylcytidine-3'-phosphate
  modified_base 13: mod_base = OTHER; note = 2'-O-methyladenosine-3'-phosphate
  modified_base 14: mod_base = OTHER; note = 2'-deoxy-2'-fluorouridine-3'-phosphate
  modified_base 15: mod_base = OTHER; note = 2'-O-methylcytidine-3'-phosphate
  modified_base 16: mod_base = OTHER; note = 2'-deoxy-2'-fluorocytidine-3'-phosphate
  modified_base 17: mod_base = OTHER; note = 2'-O-methyluridine-3'-phosphate
  modified_base 18: mod_base = OTHER; note = 2'-O-methyluridine-3'-phosphate
  modified_base 19: mod_base = OTHER; note = 2'-O-methyluridine-3'-phosphate
  modified_base 20: mod_base = OTHER; note = 2'-O-methylguanosine-3'-phosphate
  modified_base 21: mod_base = OTHER; note = 2'-O-methylguanosine-3'-phosphorothioate
  modified_base 22: mod_base = OTHER; note = 2'-O-methylcytidine-3'-phosphorothioate
  modified_base 23: mod_base = OTHER; note = 2'-O-methylcytidine
  misc_feature 1..4: note = RNA
  misc_feature 6..23: note = RNA
  misc_feature 5: note = DNA
atgcctctcttcatcctttggcc

SEQ ID NO: 1209 - DNA, 23 bp, synthetic construct
  source 1..23: mol_type = other DNA
  modified_base 1: mod_base = OTHER; note = 2'-O-methyladenosine-3'-phosphorothioate
  modified_base 2: mod_base = OTHER; note = 2'-deoxy-2'-fluoroadenosine-3'-phosphorothioate
  modified_base 3: mod_base = OTHER; note = 2'-O-methyluridine-3'-phosphate
  modified_base 4: mod_base = OTHER; note = 2'-O-methylguanosine-3'-phosphate
  modified_base 6: mod_base = OTHER; note = 2'-O-methylcytidine-3'-phosphate
  modified_base 7: mod_base = OTHER; note = Thymidine-glycol nucleic acid (GNA), S-Isomer
  modified_base 8: mod_base = OTHER; note = 2'-O-methylcytidine-3'-phosphate
  modified_base 9: mod_base = OTHER; note = 2'-O-methyluridine-3'-phosphate
  modified_base 10: mod_base = OTHER; note = 2'-O-methylcytidine-3'-phosphate
  modified_base 11: mod_base = OTHER; note = 2'-O-methyluridine-3'-phosphate
  modified_base 12: mod_base = OTHER; note = 2'-O-methyluridine-3'-phosphate
  modified_base 13: mod_base = OTHER; note = 2'-O-methylcytidine-3'-phosphate
  modified_base 14: mod_base = OTHER; note = 2'-deoxy-2'-fluoroadenosine-3'-phosphate
  modified_base 15: mod_base = OTHER; note = 2'-O-methyluridine-3'-phosphate
  modified_base 16: mod_base = OTHER; note = 2'-deoxy-2'-fluorocytidine-3'-phosphate
  modified_base 17: mod_base = OTHER; note = 2'-O-methylcytidine-3'-phosphate
  modified_base 18: mod_base = OTHER; note = 2'-O-methyluridine-3'-phosphate
  modified_base 19: mod_base = OTHER; note = 2'-O-methyluridine-3'-phosphate
  modified_base 20: mod_base = OTHER; note = 2'-O-methyluridine-3'-phosphate
  modified_base 21: mod_base = OTHER; note = 2'-O-methylguanosine-3'-phosphorothioate
  modified_base 22: mod_base = OTHER; note = 2'-O-methylguanosine-3'-phosphorothioate
  modified_base 23: mod_base = OTHER; note = 2'-O-methylcytidine
  misc_feature 1..4: note = RNA
  misc_feature 6..23: note = RNA
  misc_feature 5: note = DNA
aatgcctctcttcatcctttggc

SEQ ID NO: 1210 - DNA, 23 bp, synthetic construct
  source 1..23: mol_type = other DNA
  modified_base 1: mod_base = OTHER; note = 2'-O-methyladenosine-3'-phosphorothioate
  modified_base 2: mod_base = OTHER; note = 2'-deoxy-2'-fluorocytidine-3'-phosphorothioate
  modified_base 3: mod_base = OTHER; note = 2'-O-methyladenosine-3'-phosphate
  modified_base 4: mod_base = OTHER; note = 2'-O-methyluridine-3'-phosphate
  modified_base 6: mod_base = OTHER; note = 2'-O-methylcytidine-3'-phosphate
  modified_base 7: mod_base = OTHER; note = cytidine-2'-phosphate
  modified_base 8: mod_base = OTHER; note = 2'-O-methyluridine-3'-phosphate
  modified_base 9: mod_base = OTHER; note = 2'-O-methylcytidine-3'-phosphate
  modified_base 10: mod_base = OTHER; note = 2'-O-methyluridine-3'-phosphate
  modified_base 11: mod_base = OTHER; note = 2'-O-methylcytidine-3'-phosphate
  modified_base 12: mod_base = OTHER; note = 2'-O-methyluridine-3'-phosphate
  modified_base 13: mod_base = OTHER; note = 2'-O-methyluridine-3'-phosphate
  modified_base 14: mod_base = OTHER; note = 2'-deoxy-2'-fluorocytidine-3'-phosphate
  modified_base 15: mod_base = OTHER; note = 2'-O-methyladenosine-3'-phosphate
  modified_base 16: mod_base = OTHER; note = 2'-deoxy-2'-fluorouridine-3'-phosphate
  modified_base 17: mod_base = OTHER; note = 2'-O-methylcytidine-3'-phosphate
  modified_base 18: mod_base = OTHER; note = 2'-O-methylcytidine-3'-phosphate
  modified_base 19: mod_base = OTHER; note = 2'-O-methyluridine-3'-phosphate
  modified_base 20: mod_base = OTHER; note = 2'-O-methyluridine-3'-phosphate
  modified_base 21: mod_base = OTHER; note = 2'-O-methyluridine-3'-phosphorothioate
  modified_base 22: mod_base = OTHER; note = 2'-O-methylguanosine-3'-phosphorothioate
  modified_base 23: mod_base = OTHER; note = 2'-O-methylguanosine
  misc_feature 1..4: note = RNA
  misc_feature 6..23: note = RNA
  misc_feature 5: note = DNA
acatgcctctcttcatcctttgg

SEQ ID NO: 1211 - DNA, 23 bp, synthetic construct
  source 1..23: mol_type = other DNA
  modified_base 1: mod_base = OTHER; note = 2'-O-methyladenosine-3'-phosphorothioate
  modified_base 2: mod_base = OTHER; note = 2'-deoxy-2'-fluoroadenosine-3'-phosphorothioate
  modified_base 3: mod_base = OTHER; note = 2'-O-methylcytidine-3'-phosphate
  modified_base 4: mod_base = OTHER; note = 2'-O-methyladenosine-3'-phosphate
  modified_base 6: mod_base = OTHER; note = 2'-O-methylguanosine-3'-phosphate
  modified_base 7: mod_base = OTHER; note = cytidine-2'-phosphate
  modified_base 8: mod_base = OTHER; note = 2'-O-methylcytidine-3'-phosphate
  modified_base 9: mod_base = OTHER; note = 2'-O-methyluridine-3'-phosphate
  modified_base 10: mod_base = OTHER; note = 2'-O-methylcytidine-3'-phosphate
  modified_base 11: mod_base = OTHER; note = 2'-O-methyluridine-3'-phosphate
  modified_base 12: mod_base = OTHER; note = 2'-O-methylcytidine-3'-phosphate
  modified_base 13: mod_base = OTHER; note = 2'-O-methyluridine-3'-phosphate
  modified_base 14: mod_base = OTHER; note = 2'-deoxy-2'-fluorouridine-3'-phosphate
  modified_base 15: mod_base = OTHER; note = 2'-O-methylcytidine-3'-phosphate
  modified_base 16: mod_base = OTHER; note = 2'-deoxy-2'-fluoroadenosine-3'-phosphate
  modified_base 17: mod_base = OTHER; note = 2'-O-methyluridine-3'-phosphate
  modified_base 18: mod_base = OTHER; note = 2'-O-methylcytidine-3'-phosphate
  modified_base 19: mod_base = OTHER; note = 2'-O-methylcytidine-3'-phosphate
  modified_base 20: mod_base = OTHER; note = 2'-O-methyluridine-3'-phosphate
  modified_base 21: mod_base = OTHER; note = 2'-O-methyluridine-3'-phosphorothioate
  modified_base 22: mod_base = OTHER; note = 2'-O-methyluridine-3'-phosphorothioate
  modified_base 23: mod_base = OTHER; note = 2'-O-methylguanosine
  misc_feature 1..4: note = RNA
  misc_feature 6..23: note = RNA
  misc_feature 5: note = DNA
aacatgcctctcttcatcctttg

SEQ ID NO: 1212 - DNA, 23 bp, synthetic construct
  source 1..23: mol_type = other DNA
  modified_base 1: mod_base = OTHER; note = 2'-O-methyladenosine-3'-phosphorothioate
  modified_base 2: mod_base = OTHER; note = 2'-deoxy-2'-fluoroadenosine-3'-phosphorothioate
  modified_base 3: mod_base = OTHER; note = 2'-O-methyladenosine-3'-phosphate
  modified_base 4: mod_base = OTHER; note = 2'-O-methylcytidine-3'-phosphate
  modified_base 6: mod_base = OTHER; note = 2'-O-methyluridine-3'-phosphate
  modified_base 7: mod_base = OTHER; note = guanosine-2'-phosphate
  modified_base 8: mod_base = OTHER; note = 2'-O-methylcytidine-3'-phosphate
  modified_base 9: mod_base = OTHER; note = 2'-O-methylcytidine-3'-phosphate
  modified_base 10: mod_base = OTHER; note = 2'-O-methyluridine-3'-phosphate
  modified_base 11: mod_base = OTHER; note = 2'-O-methylcytidine-3'-phosphate
  modified_base 12: mod_base = OTHER; note = 2'-O-methyluridine-3'-phosphate
  modified_base 13: mod_base = OTHER; note = 2'-O-methylcytidine-3'-phosphate
  modified_base 14: mod_base = OTHER; note = 2'-deoxy-2'-fluorouridine-3'-phosphate
  modified_base 15: mod_base = OTHER; note = 2'-O-methyluridine-3'-phosphate
  modified_base 16: mod_base = OTHER; note = 2'-deoxy-2'-fluorocytidine-3'-phosphate
  modified_base 17: mod_base = OTHER; note = 2'-O-methyladenosine-3'-phosphate
  modified_base 18: mod_base = OTHER; note = 2'-O-methyluridine-3'-phosphate
  modified_base 19: mod_base = OTHER; note = 2'-O-methylcytidine-3'-phosphate
  modified_base 20: mod_base = OTHER; note = 2'-O-methylcytidine-3'-phosphate
  modified_base 21: mod_base = OTHER; note = 2'-O-methyluridine-3'-phosphorothioate
  modified_base 22: mod_base = OTHER; note = 2'-O-methyluridine-3'-phosphorothioate
  modified_base 23: mod_base = OTHER; note = 2'-O-methyluridine
  misc_feature 1..4: note = RNA
  misc_feature 6..23: note = RNA
  misc_feature 5: note = DNA
aaacatgcctctcttcatccttt

SEQ ID NO: 1213 - RNA, 23 nt, synthetic construct
  source 1..23: mol_type = other RNA
  modified_base 1: mod_base = OTHER; note = 2'-O-methyladenosine-3'-phosphorothioate
  modified_base 2: mod_base = OTHER; note = 2'-deoxy-2'-fluorocytidine-3'-phosphorothioate
  modified_base 3: mod_base = OTHER; note = 2'-O-methyladenosine-3'-phosphate
  modified_base 4: mod_base = OTHER; note = 2'-O-methyladenosine-3'-phosphate
  modified_base 5: mod_base = OTHER; note = 2'-O-methylcytidine-3'-phosphate
  modified_base 6: mod_base = OTHER; note = 2'-deoxy-2'-fluoroadenosine-3'-phosphate
  modified_base 7: mod_base = OTHER; note = 2'-O-methyluridine-3'-phosphate
  modified_base 8: mod_base = OTHER; note = 2'-O-methylguanosine-3'-phosphate
  modified_base 9: mod_base = OTHER; note = 2'-O-methylcytidine-3'-phosphate
  modified_base 10: mod_base = OTHER; note = 2'-O-methylcytidine-3'-phosphate
  modified_base 11: mod_base = OTHER; note = 2'-O-methyluridine-3'-phosphate
  modified_base 12: mod_base = OTHER; note = 2'-O-methylcytidine-3'-phosphate
  modified_base 13: mod_base = OTHER; note = 2'-O-methyluridine-3'-phosphate
  modified_base 14: mod_base = OTHER; note = 2'-deoxy-2'-fluorocytidine-3'-phosphate
  modified_base 15: mod_base = OTHER; note = 2'-O-methyluridine-3'-phosphate
  modified_base 16: mod_base = OTHER; note = 2'-deoxy-2'-fluorouridine-3'-phosphate
  modified_base 17: mod_base = OTHER; note = 2'-O-methylcytidine-3'-phosphate
  modified_base 18: mod_base = OTHER; note = 2'-O-methyladenosine-3'-phosphate
  modified_base 19: mod_base = OTHER; note = 2'-O-methyluridine-3'-phosphate
  modified_base 20: mod_base = OTHER; note = 2'-O-methylcytidine-3'-phosphate
  modified_base 21: mod_base = OTHER; note = 2'-O-methylcytidine-3'-phosphorothioate
  modified_base 22: mod_base = OTHER; note = 2'-O-methyluridine-3'-phosphorothioate
  modified_base 23: mod_base = OTHER; note = 2'-O-methyluridine
acaacatgcctctcttcatcctt

SEQ ID NO: 1214 - RNA, 23 nt, synthetic construct
  source 1..23: mol_type = other RNA
  modified_base 1: mod_base = OTHER; note = 2'-O-methyladenosine-3'-phosphorothioate
  modified_base 2: mod_base = OTHER; note = 2'-deoxy-2'-fluorocytidine-3'-phosphorothioate
  modified_base 3: mod_base = OTHER; note = 2'-O-methylcytidine-3'-phosphate
  modified_base 4: mod_base = OTHER; note = 2'-O-methyladenosine-3'-phosphate
  modified_base 5: mod_base = OTHER; note = 2'-O-methyladenosine-3'-phosphate
  modified_base 6: mod_base = OTHER; note = 2'-deoxy-2'-fluorocytidine-3'-phosphate
  modified_base 7: mod_base = OTHER; note = 2'-O-methyladenosine-3'-phosphate
  modified_base 8: mod_base = OTHER; note = 2'-O-methyluridine-3'-phosphate
  modified_base 9: mod_base = OTHER; note = 2'-O-methylguanosine-3'-phosphate
  modified_base 10: mod_base = OTHER; note = 2'-O-methylcytidine-3'-phosphate
  modified_base 11: mod_base = OTHER; note = 2'-O-methylcytidine-3'-phosphate
  modified_base 12: mod_base = OTHER; note = 2'-O-methyluridine-3'-phosphate
  modified_base 13: mod_base = OTHER; note = 2'-O-methylcytidine-3'-phosphate
  modified_base 14: mod_base = OTHER; note = 2'-deoxy-2'-fluorouridine-3'-phosphate
  modified_base 15: mod_base = OTHER; note = 2'-O-methylcytidine-3'-phosphate
  modified_base 16: mod_base = OTHER; note = 2'-deoxy-2'-fluorouridine-3'-phosphate
  modified_base 17: mod_base = OTHER; note = 2'-O-methyluridine-3'-phosphate
  modified_base 18: mod_base = OTHER; note = 2'-O-methylcytidine-3'-phosphate
  modified_base 19: mod_base = OTHER; note = 2'-O-methyladenosine-3'-phosphate
  modified_base 20: mod_base = OTHER; note = 2'-O-methyluridine-3'-phosphate
  modified_base 21: mod_base = OTHER; note = 2'-O-methylcytidine-3'-phosphorothioate
  modified_base 22: mod_base = OTHER; note = 2'-O-methylcytidine-3'-phosphorothioate
  modified_base 23: mod_base = OTHER; note = 2'-O-methyluridine
accaacatgcctctcttcatcct

SEQ ID NO: 1215 - RNA, 23 nt, synthetic construct
  source 1..23: mol_type = other RNA
  modified_base 1: mod_base = OTHER; note = 2'-O-methyladenosine-3'-phosphorothioate
  modified_base 2: mod_base = OTHER; note = 2'-deoxy-2'-fluorouridine-3'-phosphorothioate
  modified_base 3: mod_base = OTHER; note = 2'-O-methylcytidine-3'-phosphate
  modified_base 4: mod_base = OTHER; note = 2'-O-methylcytidine-3'-phosphate
  modified_base 5: mod_base = OTHER; note = 2'-O-methyladenosine-3'-phosphate
  modified_base 6: mod_base = OTHER; note = 2'-deoxy-2'-fluoroadenosine-3'-phosphate
  modified_base 7: mod_base = OTHER; note = 2'-O-methylcytidine-3'-phosphate
  modified_base 8: mod_base = OTHER; note = 2'-O-methyladenosine-3'-phosphate
  modified_base 9: mod_base = OTHER; note = 2'-O-methyluridine-3'-phosphate
  modified_base 10: mod_base = OTHER; note = 2'-O-methylguanosine-3'-phosphate
  modified_base 11: mod_base = OTHER; note = 2'-O-methylcytidine-3'-phosphate
  modified_base 12: mod_base = OTHER; note = 2'-O-methylcytidine-3'-phosphate
  modified_base 13: mod_base = OTHER; note = 2'-O-methyluridine-3'-phosphate
  modified_base 14: mod_base = OTHER; note = 2'-deoxy-2'-fluorocytidine-3'-phosphate
  modified_base 15: mod_base = OTHER; note = 2'-O-methyluridine-3'-phosphate
  modified_base 16: mod_base = OTHER; note = 2'-deoxy-2'-fluorocytidine-3'-phosphate
  modified_base 17: mod_base = OTHER; note = 2'-O-methyluridine-3'-phosphate
  modified_base 18: mod_base = OTHER; note = 2'-O-methyluridine-3'-phosphate
  modified_base 19: mod_base = OTHER; note = 2'-O-methylcytidine-3'-phosphate
  modified_base 20: mod_base = OTHER; note = 2'-O-methyladenosine-3'-phosphate
  modified_base 21: mod_base = OTHER; note = 2'-O-methyluridine-3'-phosphorothioate
  modified_base 22: mod_base = OTHER; note = 2'-O-methylcytidine-3'-phosphorothioate
  modified_base 23: mod_base = OTHER; note = 2'-O-methylcytidine
atccaacatgcctctcttcatcc

SEQ ID NO: 1216 - RNA, 23 nt, synthetic construct
  source 1..23: mol_type = other RNA
  modified_base 1: mod_base = OTHER; note = 2'-O-methyladenosine-3'-phosphorothioate
  modified_base 2: mod_base = OTHER; note = 2'-deoxy-2'-fluorocytidine-3'-phosphorothioate
  modified_base 3: mod_base = OTHER; note = 2'-O-methyluridine-3'-phosphate
  modified_base 4: mod_base = OTHER; note = 2'-O-methylcytidine-3'-phosphate
  modified_base 5: mod_base = OTHER; note = 2'-O-methylcytidine-3'-phosphate
  modified_base 6: mod_base = OTHER; note = 2'-deoxy-2'-fluoroadenosine-3'-phosphate
  modified_base 7: mod_base = OTHER; note = 2'-O-methyladenosine-3'-phosphate
  modified_base 8: mod_base = OTHER; note = 2'-O-methylcytidine-3'-phosphate
  modified_base 9: mod_base = OTHER; note = 2'-O-methyladenosine-3'-phosphate
  modified_base 10: mod_base = OTHER; note = 2'-O-methyluridine-3'-phosphate
  modified_base 11: mod_base = OTHER; note = 2'-O-methylguanosine-3'-phosphate
  modified_base 12: mod_base = OTHER; note = 2'-O-methylcytidine-3'-phosphate
  modified_base 13: mod_base = OTHER; note = 2'-O-methylcytidine-3'-phosphate
  modified_base 14: mod_base = OTHER; note = 2'-deoxy-2'-fluorouridine-3'-phosphate
  modified_base 15: mod_base = OTHER; note = 2'-O-methylcytidine-3'-phosphate
  modified_base 16: mod_base = OTHER; note = 2'-deoxy-2'-fluorouridine-3'-phosphate
  modified_base 17: mod_base = OTHER; note = 2'-O-methylcytidine-3'-phosphate
  modified_base 18: mod_base = OTHER; note = 2'-O-methyluridine-3'-phosphate
  modified_base 19: mod_base = OTHER; note = 2'-O-methyluridine-3'-phosphate
  modified_base 20: mod_base = OTHER; note = 2'-O-methylcytidine-3'-phosphate
  modified_base 21: mod_base = OTHER; note = 2'-O-methyladenosine-3'-phosphorothioate
  modified_base 22: mod_base = OTHER; note = 2'-O-methyluridine-3'-phosphorothioate
  modified_base 23: mod_base = OTHER; note = 2'-O-methylcytidine
actccaacatgcctctcttcatc

SEQ ID NO: 1217 - RNA, 23 nt, synthetic construct
  source 1..23: mol_type = other RNA
  modified_base 1: mod_base = OTHER; note = 2'-O-methyladenosine-3'-phosphorothioate
  modified_base 2: mod_base = OTHER; note = 2'-deoxy-2'-fluorouridine-3'-phosphorothioate
  modified_base 3: mod_base = OTHER; note = 2'-O-methylcytidine-3'-phosphate
  modified_base 4: mod_base = OTHER; note = 2'-O-methyluridine-3'-phosphate
  modified_base 5: mod_base = OTHER; note = 2'-O-methylcytidine-3'-phosphate
  modified_base 6: mod_base = OTHER; note = 2'-deoxy-2'-fluorocytidine-3'-phosphate
  modified_base 7: mod_base = OTHER; note = 2'-O-methyladenosine-3'-phosphate
  modified_base 8: mod_base = OTHER; note = 2'-O-methyladenosine-3'-phosphate
  modified_base 9: mod_base = OTHER; note = 2'-O-methylcytidine-3'-phosphate
  modified_base 10: mod_base = OTHER; note = 2'-O-methyladenosine-3'-phosphate
  modified_base 11: mod_base = OTHER; note = 2'-O-methyluridine-3'-phosphate
  modified_base 12: mod_base = OTHER; note = 2'-O-methylguanosine-3'-phosphate
  modified_base 13: mod_base = OTHER; note = 2'-O-methylcytidine-3'-phosphate
  modified_base 14: mod_base = OTHER; note = 2'-deoxy-2'-fluorocytidine-3'-phosphate
  modified_base 15: mod_base = OTHER; note = 2'-O-methyluridine-3'-phosphate
  modified_base 16: mod_base = OTHER; note = 2'-deoxy-2'-fluorocytidine-3'-phosphate
  modified_base 17: mod_base = OTHER; note = 2'-O-methyluridine-3'-phosphate
  modified_base 18: mod_base = OTHER; note = 2'-O-methylcytidine-3'-phosphate
  modified_base 19: mod_base = OTHER; note = 2'-O-methyluridine-3'-phosphate
  modified_base 20: mod_base = OTHER; note = 2'-O-methyluridine-3'-phosphate
  modified_base 21: mod_base = OTHER; note = 2'-O-methylcytidine-3'-phosphorothioate
  modified_base 22: mod_base = OTHER; note = 2'-O-methyladenosine-3'-phosphorothioate
  modified_base 23: mod_base = OTHER; note = 2'-O-methyluridine
atctccaacatgcctctcttcat

SEQ ID NO: 1218 - DNA, 23 bp, synthetic construct
  source 1..23: mol_type = other DNA
  modified_base 1: mod_base = OTHER; note = 2'-O-methyladenosine-3'-phosphorothioate
  modified_base 2: mod_base = OTHER; note = 2'-deoxy-2'-fluoroguanosine-3'-phosphorothioate
  modified_base 3: mod_base = OTHER; note = 2'-O-methyluridine-3'-phosphate
  modified_base 4: mod_base = OTHER; note = 2'-O-methylcytidine-3'-phosphate
  modified_base 6: mod_base = OTHER; note = 2'-O-methylcytidine-3'-phosphate
  modified_base 7: mod_base = OTHER; note = cytidine-2'-phosphate
  modified_base 8: mod_base = OTHER; note = 2'-O-methyladenosine-3'-phosphate
  modified_base 9: mod_base = OTHER; note = 2'-O-methyladenosine-3'-phosphate
  modified_base 10: mod_base = OTHER; note = 2'-O-methylcytidine-3'-phosphate
  modified_base 11: mod_base = OTHER; note = 2'-O-methyladenosine-3'-phosphate
  modified_base 12: mod_base = OTHER; note = 2'-O-methyluridine-3'-phosphate
  modified_base 13: mod_base = OTHER; note = 2'-O-methylguanosine-3'-phosphate
  modified_base 14: mod_base = OTHER; note = 2'-deoxy-2'-fluorocytidine-3'-phosphate
  modified_base 15: mod_base = OTHER; note = 2'-O-methylcytidine-3'-phosphate
  modified_base 16: mod_base = OTHER; note = 2'-deoxy-2'-fluorouridine-3'-phosphate
  modified_base 17: mod_base = OTHER; note = 2'-O-methylcytidine-3'-phosphate
  modified_base 18: mod_base = OTHER; note = 2'-O-methyluridine-3'-phosphate
  modified_base 19: mod_base = OTHER; note = 2'-O-methylcytidine-3'-phosphate
  modified_base 20: mod_base = OTHER; note = 2'-O-methyluridine-3'-phosphate
  modified_base 21: mod_base = OTHER; note = 2'-O-methyluridine-3'-phosphorothioate
  modified_base 22: mod_base = OTHER; note = 2'-O-methylcytidine-3'-phosphorothioate
  modified_base 23: mod_base = OTHER; note = 2'-O-methyladenosine
  misc_feature 1..4: note = RNA
  misc_feature 6..23: note = RNA
  misc_feature 5: note = DNA
agtctccaacatgcctctcttca

SEQ ID NO: 1219 - DNA, 23 bp, synthetic construct
  source 1..23: mol_type = other DNA
  modified_base 1: mod_base = OTHER; note = 2'-O-methyladenosine-3'-phosphorothioate
  modified_base 2: mod_base = OTHER; note = 2'-deoxy-2'-fluoroadenosine-3'-phosphorothioate
  modified_base 3: mod_base = OTHER; note = 2'-O-methylguanosine-3'-phosphate
  modified_base 4: mod_base = OTHER; note = 2'-O-methyluridine-3'-phosphate
  modified_base 6: mod_base = OTHER; note = 2'-O-methyluridine-3'-phosphate
  modified_base 7: mod_base = OTHER; note = cytidine-2'-phosphate
  modified_base 8: mod_base = OTHER; note = 2'-O-methylcytidine-3'-phosphate
  modified_base 9: mod_base = OTHER; note = 2'-O-methyladenosine-3'-phosphate
  modified_base 10: mod_base = OTHER; note = 2'-O-methyladenosine-3'-phosphate
  modified_base 11: mod_base = OTHER; note = 2'-O-methylcytidine-3'-phosphate
  modified_base 12: mod_base = OTHER; note = 2'-O-methyladenosine-3'-phosphate
  modified_base 13: mod_base = OTHER; note = 2'-O-methyluridine-3'-phosphate
  modified_base 14: mod_base = OTHER; note = 2'-deoxy-2'-fluoroguanosine-3'-phosphate
  modified_base 15: mod_base = OTHER; note = 2'-O-methylcytidine-3'-phosphate
  modified_base 16: mod_base = OTHER; note = 2'-deoxy-2'-fluorocytidine-3'-phosphate
  modified_base 17: mod_base = OTHER; note = 2'-O-methyluridine-3'-phosphate
  modified_base 18: mod_base = OTHER; note = 2'-O-methylcytidine-3'-phosphate
  modified_base 19: mod_base = OTHER; note = 2'-O-methyluridine-3'-phosphate
  modified_base 20: mod_base = OTHER; note = 2'-O-methylcytidine-3'-phosphate
  modified_base 21: mod_base = OTHER; note = 2'-O-methyluridine-3'-phosphorothioate
  modified_base 22: mod_base = OTHER; note = 2'-O-methyluridine-3'-phosphorothioate
  modified_base 23: mod_base = OTHER; note = 2'-O-methylcytidine
  misc_feature 1..4: note = RNA
  misc_feature 6..23: note = RNA
  misc_feature 5: note = DNA
aagtctccaacatgcctctcttc

SEQ ID NO: 1220 - DNA, 23 bp, synthetic construct
  source 1..23: mol_type = other DNA
  modified_base 1: mod_base = OTHER; note = 2'-O-methyladenosine-3'-phosphorothioate
  modified_base 2: mod_base = OTHER; note = 2'-deoxy-2'-fluoroadenosine-3'-phosphorothioate
  modified_base 3: mod_base = OTHER; note = 2'-O-methyladenosine-3'-phosphate
  modified_base 4: mod_base = OTHER; note = 2'-O-methylguanosine-3'-phosphate
  modified_base 6: mod_base = OTHER; note = 2'-O-methylcytidine-3'-phosphate
  modified_base 7: mod_base = OTHER; note = Thymidine-glycol nucleic acid (GNA), S-Isomer
  modified_base 8: mod_base = OTHER; note = 2'-O-methylcytidine-3'-phosphate
  modified_base 9: mod_base = OTHER; note = 2'-O-methylcytidine-3'-phosphate
  modified_base 10: mod_base = OTHER; note = 2'-O-methyladenosine-3'-phosphate
  modified_base 11: mod_base = OTHER; note = 2'-O-methyladenosine-3'-phosphate
  modified_base 12: mod_base = OTHER; note = 2'-O-methylcytidine-3'-phosphate
  modified_base 13: mod_base = OTHER; note = 2'-O-methyladenosine-3'-phosphate
  modified_base 14: mod_base = OTHER; note = 2'-deoxy-2'-fluorouridine-3'-phosphate
  modified_base 15: mod_base = OTHER; note = 2'-O-methylguanosine-3'-phosphate
  modified_base 16: mod_base = OTHER; note = 2'-deoxy-2'-fluorocytidine-3'-phosphate
  modified_base 17: mod_base = OTHER; note = 2'-O-methylcytidine-3'-phosphate
  modified_base 18: mod_base = OTHER; note = 2'-O-methyluridine-3'-phosphate
  modified_base 19: mod_base = OTHER; note = 2'-O-methylcytidine-3'-phosphate
  modified_base 20: mod_base = OTHER; note = 2'-O-methyluridine-3'-phosphate
  modified_base 21: mod_base = OTHER; note = 2'-O-methylcytidine-3'-phosphorothioate
  modified_base 22: mod_base = OTHER; note = 2'-O-methyluridine-3'-phosphorothioate
  modified_base 23: mod_base = OTHER; note = 2'-O-methyluridine
  misc_feature 1..4: note = RNA
  misc_feature 6..23: note = RNA
  misc_feature 5: note = DNA
aaagtctccaacatgcctctctt

SEQ ID NO: 1221 - DNA, 23 bp, synthetic construct
  source 1..23: mol_type = other DNA
  modified_base 1: mod_base = OTHER; note = 2'-O-methyladenosine-3'-phosphorothioate
  modified_base 2: mod_base = OTHER; note = 2'-deoxy-2'-fluorocytidine-3'-phosphorothioate
  modified_base 3: mod_base = OTHER; note = 2'-O-methyladenosine-3'-phosphate
  modified_base 4: mod_base = OTHER; note = 2'-O-methyladenosine-3'-phosphate
  modified_base 6: mod_base = OTHER; note = 2'-O-methyluridine-3'-phosphate
  modified_base 7: mod_base = OTHER; note = cytidine-2'-phosphate
  modified_base 8: mod_base = OTHER; note = 2'-O-methyluridine-3'-phosphate
  modified_base 9: mod_base = OTHER; note = 2'-O-methylcytidine-3'-phosphate
  modified_base 10: mod_base = OTHER; note = 2'-O-methylcytidine-3'-phosphate
  modified_base 11: mod_base = OTHER; note = 2'-O-methyladenosine-3'-phosphate
  modified_base 12: mod_base = OTHER; note = 2'-O-methyladenosine-3'-phosphate
  modified_base 13: mod_base = OTHER; note = 2'-O-methylcytidine-3'-phosphate
  modified_base 14: mod_base = OTHER; note = 2'-deoxy-2'-fluoroadenosine-3'-phosphate
  modified_base 15: mod_base = OTHER; note = 2'-O-methyluridine-3'-phosphate
  modified_base 16: mod_base = OTHER; note = 2'-deoxy-2'-fluoroguanosine-3'-phosphate
  modified_base 17: mod_base = OTHER; note = 2'-O-methylcytidine-3'-phosphate
  modified_base 18: mod_base = OTHER; note = 2'-O-methylcytidine-3'-phosphate
  modified_base 19: mod_base = OTHER; note = 2'-O-methyluridine-3'-phosphate
  modified_base 20: mod_base = OTHER; note = 2'-O-methylcytidine-3'-phosphate
  modified_base 21: mod_base = OTHER; note = 2'-O-methyluridine-3'-phosphorothioate
  modified_base 22: mod_base = OTHER; note = 2'-O-methylcytidine-3'-phosphorothioate
  modified_base 23: mod_base = OTHER; note = 2'-O-methyluridine
  misc_feature 1..4: note = RNA
  misc_feature 6..23: note = RNA
  misc_feature 5: note = DNA
acaagtctccaacatgcctctct

SEQ ID NO: 1222 - DNA, 23 bp, synthetic construct
  source 1..23: mol_type = other DNA
  modified_base 1: mod_base = OTHER; note = 2'-O-methyladenosine-3'-phosphorothioate
  modified_base 2: mod_base = OTHER; note = 2'-deoxy-2'-fluorocytidine-3'-phosphorothioate
  modified_base 3: mod_base = OTHER; note = 2'-O-methylcytidine-3'-phosphate
  modified_base 4: mod_base = OTHER; note = 2'-O-methyluridine-3'-phosphate
  modified_base 6: mod_base = OTHER; note = 2'-O-methyluridine-3'-phosphate
  modified_base 7: mod_base = OTHER; note = guanosine-2'-phosphate
  modified_base 8: mod_base = OTHER; note = 2'-O-methylcytidine-3'-phosphate
  modified_base 9: mod_base = OTHER; note = 2'-O-methylcytidine-3'-phosphate
  modified_base 10: mod_base = OTHER; note = 2'-O-methylcytidine-3'-phosphate
  modified_base 11: mod_base = OTHER; note = 2'-O-methyladenosine-3'-phosphate
  modified_base 12: mod_base = OTHER; note = 2'-O-methyladenosine-3'-phosphate
  modified_base 13: mod_base = OTHER; note = 2'-O-methylguanosine-3'-phosphate
  modified_base 14: mod_base = OTHER; note = 2'-deoxy-2'-fluorouridine-3'-phosphate
  modified_base 15: mod_base = OTHER; note = 2'-O-methylcytidine-3'-phosphate
  modified_base 16: mod_base = OTHER; note = 2'-deoxy-2'-fluoroadenosine-3'-phosphate
  modified_base 17: mod_base = OTHER; note = 2'-O-methyluridine-3'-phosphate
  modified_base 18: mod_base = OTHER; note = 2'-O-methylcytidine-3'-phosphate
  modified_base 19: mod_base = OTHER; note = 2'-O-methyluridine-3'-phosphate
  modified_base 20: mod_base = OTHER; note = 2'-O-methylguanosine-3'-phosphate
  modified_base 21: mod_base = OTHER; note = 2'-O-methylcytidine-3'-phosphorothioate
  modified_base 22: mod_base = OTHER; note = 2'-O-methyluridine-3'-phosphorothioate
  modified_base 23: mod_base = OTHER; note = 2'-O-methyluridine
  misc_feature 1..4: note = RNA
  misc_feature 6..23: note = RNA
  misc_feature 5: note = DNA
acctttgcccaagtcatctgctt

SEQ ID NO: 1223 - RNA, 23 nt, synthetic construct
  source 1..23: mol_type = other RNA
  modified_base 1: mod_base = OTHER; note = 2'-O-methyladenosine-3'-phosphorothioate
  modified_base 2: mod_base = OTHER; note = 2'-deoxy-2'-fluoroadenosine-3'-phosphorothioate
  modified_base 3: mod_base = OTHER; note = 2'-O-methylcytidine-3'-phosphate
  modified_base 4: mod_base = OTHER; note = 2'-O-methylcytidine-3'-phosphate
  modified_base 5: mod_base = OTHER; note = 2'-O-methyluridine-3'-phosphate
  modified_base 6: mod_base = OTHER; note = 2'-deoxy-2'-fluorouridine-3'-phosphate
  modified_base 7: mod_base = OTHER; note = 2'-O-methyluridine-3'-phosphate
  modified_base 8: mod_base = OTHER; note = 2'-O-methylguanosine-3'-phosphate
  modified_base 9: mod_base = OTHER; note = 2'-O-methylcytidine-3'-phosphate
  modified_base 10: mod_base = OTHER; note = 2'-O-methylcytidine-3'-phosphate
  modified_base 11: mod_base = OTHER; note = 2'-O-methylcytidine-3'-phosphate
  modified_base 12: mod_base = OTHER; note = 2'-O-methyladenosine-3'-phosphate
  modified_base 13: mod_base = OTHER; note = 2'-O-methyladenosine-3'-phosphate
  modified_base 14: mod_base = OTHER; note = 2'-deoxy-2'-fluoroguanosine-3'-phosphate
  modified_base 15: mod_base = OTHER; note = 2'-O-methyluridine-3'-phosphate
  modified_base 16: mod_base = OTHER; note = 2'-deoxy-2'-fluorocytidine-3'-phosphate
  modified_base 17: mod_base = OTHER; note = 2'-O-methyladenosine-3'-phosphate
  modified_base 18: mod_base = OTHER; note = 2'-O-methyluridine-3'-phosphate
  modified_base 19: mod_base = OTHER; note = 2'-O-methylcytidine-3'-phosphate
  modified_base 20: mod_base = OTHER; note = 2'-O-methyluridine-3'-phosphate
  modified_base 21: mod_base = OTHER; note = 2'-O-methylguanosine-3'-phosphorothioate
  modified_base 22: mod_base = OTHER; note = 2'-O-methylcytidine-3'-phosphorothioate
  modified_base 23: mod_base = OTHER; note = 2'-O-methyluridine
aacctttgcccaagtcatctgct

SEQ ID NO: 1224 - RNA, 23 nt, synthetic construct
  source 1..23: mol_type = other RNA
  modified_base 1: mod_base = OTHER; note = 2'-O-methyladenosine-3'-phosphorothioate
  modified_base 2: mod_base = OTHER; note = 2'-deoxy-2'-fluorocytidine-3'-phosphorothioate
  modified_base 3: mod_base = OTHER; note = 2'-O-methyladenosine-3'-phosphate
  modified_base 4: mod_base = OTHER; note = 2'-O-methylcytidine-3'-phosphate
  modified_base 5: mod_base = OTHER; note = 2'-O-methylcytidine-3'-phosphate
  modified_base 6: mod_base = OTHER; note = 2'-deoxy-2'-fluorouridine-3'-phosphate
  modified_base 7: mod_base = OTHER; note = 2'-O-methyluridine-3'-phosphate
  modified_base 8: mod_base = OTHER; note = 2'-O-methyluridine-3'-phosphate
  modified_base 9: mod_base = OTHER; note = 2'-O-methylguanosine-3'-phosphate
  modified_base 10: mod_base = OTHER; note = 2'-O-methylcytidine-3'-phosphate
  modified_base 11: mod_base = OTHER; note = 2'-O-methylcytidine-3'-phosphate
  modified_base 12: mod_base = OTHER; note = 2'-O-methylcytidine-3'-phosphate
  modified_base 13: mod_base = OTHER; note = 2'-O-methyladenosine-3'-phosphate
  modified_base 14: mod_base = OTHER; note = 2'-deoxy-2'-fluoroadenosine-3'-phosphate
  modified_base 15: mod_base = OTHER; note = 2'-O-methylguanosine-3'-phosphate
  modified_base 16: mod_base = OTHER; note = 2'-deoxy-2'-fluorouridine-3'-phosphate
  modified_base 17: mod_base = OTHER; note = 2'-O-methylcytidine-3'-phosphate
  modified_base 18: mod_base = OTHER; note = 2'-O-methyladenosine-3'-phosphate
  modified_base 19: mod_base = OTHER; note = 2'-O-methyluridine-3'-phosphate
  modified_base 20: mod_base = OTHER; note = 2'-O-methylcytidine-3'-phosphate
  modified_base 21: mod_base = OTHER; note = 2'-O-methyluridine-3'-phosphorothioate
  modified_base 22: mod_base = OTHER; note = 2'-O-methylguanosine-3'-phosphorothioate
  modified_base 23: mod_base = OTHER; note = 2'-O-methylcytidine
acacctttgcccaagtcatctgc

SEQ ID NO: 1225 - RNA, 23 nt, synthetic construct
  source 1..23: mol_type = other RNA
  modified_base 1: mod_base = OTHER; note = 2'-O-methyladenosine-3'-phosphorothioate
  modified_base 2: mod_base = OTHER; note = 2'-deoxy-2'-fluorocytidine-3'-phosphorothioate
  modified_base 3: mod_base = OTHER; note = 2'-O-methylcytidine-3'-phosphate
  modified_base 4: mod_base = OTHER; note = 2'-O-methyladenosine-3'-phosphate
  modified_base 5: mod_base = OTHER; note = 2'-O-methylcytidine-3'-phosphate
  modified_base 6: mod_base = OTHER; note = 2'-deoxy-2'-fluorocytidine-3'-phosphate
  modified_base 7: mod_base = OTHER; note = 2'-O-methyluridine-3'-phosphate
  modified_base 8: mod_base = OTHER; note = 2'-O-methyluridine-3'-phosphate
  modified_base 9: mod_base = OTHER; note = 2'-O-methyluridine-3'-phosphate
  modified_base 10: mod_base = OTHER; note = 2'-O-methylguanosine-3'-phosphate
  modified_base 11: mod_base = OTHER; note = 2'-O-methylcytidine-3'-phosphate
  modified_base 12: mod_base = OTHER; note = 2'-O-methylcytidine-3'-phosphate
  modified_base 13: mod_base = OTHER; note = 2'-O-methylcytidine-3'-phosphate
  modified_base 14: mod_base = OTHER; note = 2'-deoxy-2'-fluoroadenosine-3'-phosphate
  modified_base 15: mod_base = OTHER; note = 2'-O-methyladenosine-3'-phosphate
  modified_base 16: mod_base = OTHER; note = 2'-deoxy-2'-fluoroguanosine-3'-phosphate
  modified_base 17: mod_base = OTHER; note = 2'-O-methyluridine-3'-phosphate
  modified_base 18: mod_base = OTHER; note = 2'-O-methylcytidine-3'-phosphate
  modified_base 19: mod_base = OTHER; note = 2'-O-methyladenosine-3'-phosphate
  modified_base 20: mod_base = OTHER; note = 2'-O-methyluridine-3'-phosphate
  modified_base 21: mod_base = OTHER; note = 2'-O-methylcytidine-3'-phosphorothioate
  modified_base 22: mod_base = OTHER; note = 2'-O-methyluridine-3'-phosphorothioate
  modified_base 23: mod_base = OTHER; note = 2'-O-methylguanosine
accacctttgcccaagtcatctg

SEQ ID NO: 1226 - DNA, 23 bp, synthetic construct
  source 1..23: mol_type = other DNA
  modified_base 1: mod_base = OTHER; note = 2'-O-methyluridine-3'-phosphorothioate
  modified_base 2: mod_base = OTHER; note = 2'-deoxy-2'-fluorouridine-3'-phosphorothioate
  modified_base 3: mod_base = OTHER; note = 2'-O-methylcytidine-3'-phosphate
  modified_base 4: mod_base = OTHER; note = 2'-O-methylcytidine-3'-phosphate
  modified_base 6: mod_base = OTHER; note = 2'-O-methylcytidine-3'-phosphate
  modified_base 7: mod_base = OTHER; note = cytidine-2'-phosphate
  modified_base 8: mod_base = OTHER; note = 2'-O-methyluridine-3'-phosphate
  modified_base 9: mod_base = OTHER; note = 2'-O-methyluridine-3'-phosphate
  modified_base 10: mod_base = OTHER; note = 2'-O-methyluridine-3'-phosphate
  modified_base 11: mod_base = OTHER; note = 2'-O-methylguanosine-3'-phosphate
  modified_base 12: mod_base = OTHER; note = 2'-O-methylcytidine-3'-phosphate
  modified_base 13: mod_base = OTHER; note = 2'-O-methylcytidine-3'-phosphate
  modified_base 14: mod_base = OTHER; note = 2'-deoxy-2'-fluorocytidine-3'-phosphate
  modified_base 15: mod_base = OTHER; note = 2'-O-methyladenosine-3'-phosphate
  modified_base 16: mod_base = OTHER; note = 2'-deoxy-2'-fluoroadenosine-3'-phosphate
  modified_base 17: mod_base = OTHER; note = 2'-O-methylguanosine-3'-phosphate
  modified_base 18: mod_base = OTHER; note = 2'-O-methyluridine-3'-phosphate
  modified_base 19: mod_base = OTHER; note = 2'-O-methylcytidine-3'-phosphate
  modified_base 20: mod_base = OTHER; note = 2'-O-methyladenosine-3'-phosphate
  modified_base 21: mod_base = OTHER; note = 2'-O-methyluridine-3'-phosphorothioate
  modified_base 22: mod_base = OTHER; note = 2'-O-methylcytidine-3'-phosphorothioate
  modified_base 23: mod_base = OTHER; note = 2'-O-methyluridine
  misc_feature 1..4: note = RNA
  misc_feature 6..23: note = RNA
  misc_feature 5: note = DNA
ttccacctttgcccaagtcatct

SEQ ID NO: 1227 - DNA, 23 bp, synthetic construct
  source 1..23: mol_type = other DNA
  modified_base 1: mod_base = OTHER; note = 2'-O-methyluridine-3'-phosphorothioate
  modified_base 2: mod_base = OTHER; note = 2'-deoxy-2'-fluorouridine-3'-phosphorothioate
  modified_base 3: mod_base = OTHER; note = 2'-O-methyluridine-3'-phosphate
  modified_base 4: mod_base = OTHER; note = 2'-O-methylcytidine-3'-phosphate
  modified_base 6: mod_base = OTHER; note = 2'-O-methyladenosine-3'-phosphate
  modified_base 7: mod_base = OTHER; note = cytidine-2'-phosphate
  modified_base 8: mod_base = OTHER; note = 2'-O-methylcytidine-3'-phosphate
  modified_base 9: mod_base = OTHER; note = 2'-O-methyluridine-3'-phosphate
  modified_base 10: mod_base = OTHER; note = 2'-O-methyluridine-3'-phosphate
  modified_base 11: mod_base = OTHER; note = 2'-O-methyluridine-3'-phosphate
  modified_base 12: mod_base = OTHER; note = 2'-O-methylguanosine-3'-phosphate
  modified_base 13: mod_base = OTHER; note = 2'-O-methylcytidine-3'-phosphate
  modified_base 14: mod_base = OTHER; note = 2'-deoxy-2'-fluorocytidine-3'-phosphate
  modified_base 15: mod_base = OTHER; note = 2'-O-methylcytidine-3'-phosphate
  modified_base 16: mod_base = OTHER; note = 2'-deoxy-2'-fluoroadenosine-3'-phosphate
  modified_base 17: mod_base = OTHER; note = 2'-O-methyladenosine-3'-phosphate
  modified_base 18: mod_base = OTHER; note = 2'-O-methylguanosine-3'-phosphate
  modified_base 19: mod_base = OTHER; note = 2'-O-methyluridine-3'-phosphate
  modified_base 20: mod_base = OTHER; note = 2'-O-methylcytidine-3'-phosphate
  modified_base 21: mod_base = OTHER; note = 2'-O-methyladenosine-3'-phosphorothioate
  modified_base 22: mod_base = OTHER; note = 2'-O-methyluridine-3'-phosphorothioate
  modified_base 23: mod_base = OTHER; note = 2'-O-methylcytidine
  misc_feature 1..4: note = RNA
  misc_feature 6..23: note = RNA
  misc_feature 5: note = DNA
tttccacctttgcccaagtcatc

SEQ ID NO: 1228 - DNA, 23 bp, synthetic construct
  source 1..23: mol_type = other DNA
  modified_base 1: mod_base = OTHER; note = 2'-O-methyladenosine-3'-phosphorothioate
  modified_base 2: mod_base = OTHER; note = 2'-deoxy-2'-fluorouridine-3'-phosphorothioate
  modified_base 3: mod_base = OTHER; note = 2'-O-methyluridine-3'-phosphate
  modified_base 4: mod_base = OTHER; note = 2'-O-methyluridine-3'-phosphate
  modified_base 6: mod_base = OTHER; note = 2'-O-methylcytidine-3'-phosphate
  modified_base 7: mod_base = OTHER; note = Adenosine-glycol nucleic acid (GNA), S-isomer
  modified_base 8: mod_base = OTHER; note = 2'-O-methylcytidine-3'-phosphate
  modified_base 9: mod_base = OTHER; note = 2'-O-methylcytidine-3'-phosphate
  modified_base 10: mod_base = OTHER; note = 2'-O-methyluridine-3'-phosphate
  modified_base 11: mod_base = OTHER; note = 2'-O-methyluridine-3'-phosphate
  modified_base 12: mod_base = OTHER; note = 2'-O-methyluridine-3'-phosphate
  modified_base 13: mod_base = OTHER; note = 2'-O-methylguanosine-3'-phosphate
  modified_base 14: mod_base = OTHER; note = 2'-deoxy-2'-fluorocytidine-3'-phosphate
  modified_base 15: mod_base = OTHER; note = 2'-O-methylcytidine-3'-phosphate
  modified_base 16: mod_base = OTHER; note = 2'-deoxy-2'-fluorocytidine-3'-phosphate
  modified_base 17: mod_base = OTHER; note = 2'-O-methyladenosine-3'-phosphate
  modified_base 18: mod_base = OTHER; note = 2'-O-methyladenosine-3'-phosphate
  modified_base 19: mod_base = OTHER; note = 2'-O-methylguanosine-3'-phosphate
  modified_base 20: mod_base = OTHER; note = 2'-O-methyluridine-3'-phosphate
  modified_base 21: mod_base = OTHER; note = 2'-O-methylcytidine-3'-phosphorothioate
  modified_base 22: mod_base = OTHER; note = 2'-O-methyladenosine-3'-phosphorothioate
  modified_base 23: mod_base = OTHER; note = 2'-O-methyluridine
  misc_feature 1..4: note = RNA
  misc_feature 6..23: note = RNA
  misc_feature 5: note = DNA
atttccacctttgcccaagtcat

SEQ ID NO: 1229 - DNA, 23 bp, synthetic construct
  source 1..23: mol_type = other DNA
  modified_base 1: mod_base = OTHER; note = 2'-O-methyladenosine-3'-phosphorothioate
  modified_base 2: mod_base = OTHER; note = 2'-deoxy-2'-fluoroadenosine-3'-phosphorothioate
  modified_base 3: mod_base = OTHER; note = 2'-O-methyluridine-3'-phosphate
  modified_base 4: mod_base = OTHER; note = 2'-O-methyluridine-3'-phosphate
  modified_base 6: mod_base = OTHER; note = 2'-O-methylcytidine-3'-phosphate
  modified_base 7: mod_base = OTHER; note = cytidine-2'-phosphate
  modified_base 8: mod_base = OTHER; note = 2'-O-methyladenosine-3'-phosphate
  modified_base 9: mod_base = OTHER; note = 2'-O-methylcytidine-3'-phosphate
  modified_base 10: mod_base = OTHER; note = 2'-O-methylcytidine-3'-phosphate
  modified_base 11: mod_base = OTHER; note = 2'-O-methyluridine-3'-phosphate
  modified_base 12: mod_base = OTHER; note = 2'-O-methyluridine-3'-phosphate
  modified_base 13: mod_base = OTHER; note = 2'-O-methyluridine-3'-phosphate
  modified_base 14: mod_base = OTHER; note = 2'-deoxy-2'-fluoroguanosine-3'-phosphate
  modified_base 15: mod_base = OTHER; note = 2'-O-methylcytidine-3'-phosphate
  modified_base 16: mod_base = OTHER; note = 2'-deoxy-2'-fluorocytidine-3'-phosphate
  modified_base 17: mod_base = OTHER; note = 2'-O-methylcytidine-3'-phosphate
  modified_base 18: mod_base = OTHER; note = 2'-O-methyladenosine-3'-phosphate
  modified_base 19: mod_base = OTHER; note = 2'-O-methyladenosine-3'-phosphate
  modified_base 20: mod_base = OTHER; note = 2'-O-methylguanosine-3'-phosphate
  modified_base 21: mod_base = OTHER; note = 2'-O-methyluridine-3'-phosphorothioate
  modified_base 22: mod_base = OTHER; note = 2'-O-methylcytidine-3'-phosphorothioate
  modified_base 23: mod_base = OTHER; note = 2'-O-methyladenosine
  misc_feature 1..4: note = RNA
  misc_feature 6..23: note = RNA
  misc_feature 5: note = DNA
aatttccacctttgcccaagtca

SEQ ID NO: 1230 - RNA, 23 nt, synthetic construct
  source 1..23: mol_type = other RNA
  modified_base 1: mod_base = OTHER; note = 2'-O-methyladenosine-3'-phosphorothioate
  modified_base 2: mod_base = OTHER; note = 2'-deoxy-2'-fluorocytidine-3'-phosphorothioate
  modified_base 3: mod_base = OTHER; note = 2'-O-methyladenosine-3'-phosphate
  modified_base 4: mod_base = OTHER; note = 2'-O-methyluridine-3'-phosphate
  modified_base 5: mod_base = OTHER; note = 2'-O-methyluridine-3'-phosphate
  modified_base 6: mod_base = OTHER; note = 2'-deoxy-2'-fluorouridine-3'-phosphate
  modified_base 7: mod_base = OTHER; note = 2'-O-methylcytidine-3'-phosphate
  modified_base 8: mod_base = OTHER; note = 2'-O-methylcytidine-3'-phosphate
  modified_base 9: mod_base = OTHER; note = 2'-O-methyladenosine-3'-phosphate
  modified_base 10: mod_base = OTHER; note = 2'-O-methylcytidine-3'-phosphate
  modified_base 11: mod_base = OTHER; note = 2'-O-methylcytidine-3'-phosphate
  modified_base 12: mod_base = OTHER; note = 2'-O-methyluridine-3'-phosphate
  modified_base 13: mod_base = OTHER; note = 2'-O-methyluridine-3'-phosphate
  modified_base 14: mod_base = OTHER; note = 2'-deoxy-2'-fluorouridine-3'-phosphate
  modified_base 15: mod_base = OTHER; note = 2'-O-methylguanosine-3'-phosphate
  modified_base 16: mod_base = OTHER; note = 2'-deoxy-2'-fluorocytidine-3'-phosphate
  modified_base 17: mod_base = OTHER; note = 2'-O-methylcytidine-3'-phosphate
  modified_base 18: mod_base = OTHER; note = 2'-O-methylcytidine-3'-phosphate
  modified_base 19: mod_base = OTHER; note = 2'-O-methyladenosine-3'-phosphate
  modified_base 20: mod_base = OTHER; note = 2'-O-methyladenosine-3'-phosphate
  modified_base 21: mod_base = OTHER; note = 2'-O-methylguanosine-3'-phosphorothioate
  modified_base 22: mod_base = OTHER; note = 2'-O-methyluridine-3'-phosphorothioate
  modified_base 23: mod_base = OTHER; note = 2'-O-methylcytidine
acatttccacctttgcccaagtc

SEQ ID NO: 1231 - DNA, 23 bp, synthetic construct
  source 1..23: mol_type = other DNA
  modified_base 1: mod_base = OTHER; note = 2'-O-methyluridine-3'-phosphorothioate
  modified_base 2: mod_base = OTHER; note = 2'-deoxy-2'-fluorouridine-3'-phosphorothioate
  modified_base 3: mod_base = OTHER; note = 2'-O-methylcytidine-3'-phosphate
  modified_base 4: mod_base = OTHER; note = 2'-O-methyladenosine-3'-phosphate
  modified_base 6: mod_base = OTHER; note = 2'-O-methyluridine-3'-phosphate
  modified_base 7: mod_base = OTHER; note = Thymidine-glycol nucleic acid (GNA), S-Isomer
  modified_base 8: mod_base = OTHER; note = 2'-O-methylcytidine-3'-phosphate
  modified_base 9: mod_base = OTHER; note = 2'-O-methylcytidine-3'-phosphate
  modified_base 10: mod_base = OTHER; note = 2'-O-methyladenosine-3'-phosphate
  modified_base 11: mod_base = OTHER; note = 2'-O-methylcytidine-3'-phosphate
  modified_base 12: mod_base = OTHER; note = 2'-O-methylcytidine-3'-phosphate
  modified_base 13: mod_base = OTHER; note = 2'-O-methyluridine-3'-phosphate
  modified_base 14: mod_base = OTHER; note = 2'-deoxy-2'-fluorouridine-3'-phosphate
  modified_base 15: mod_base = OTHER; note = 2'-O-methyluridine-3'-phosphate
  modified_base 16: mod_base = OTHER; note = 2'-deoxy-2'-fluoroguanosine-3'-phosphate
  modified_base 17: mod_base = OTHER; note = 2'-O-methylcytidine-3'-phosphate
  modified_base 18: mod_base = OTHER; note = 2'-O-methylcytidine-3'-phosphate
  modified_base 19: mod_base = OTHER; note = 2'-O-methylcytidine-3'-phosphate
  modified_base 20: mod_base = OTHER; note = 2'-O-methyladenosine-3'-phosphate
  modified_base 21: mod_base = OTHER; note = 2'-O-methyladenosine-3'-phosphorothioate
  modified_base 22: mod_base = OTHER; note = 2'-O-methylguanosine-3'-phosphorothioate
  modified_base 23: mod_base = OTHER; note = 2'-O-methyluridine
  misc_feature 1..4: note = RNA
  misc_feature 6..23: note = RNA
  misc_feature 5: note = DNA
ttcatttccacctttgcccaagt

SEQ ID NO: 1232 - DNA, 23 bp, synthetic construct
  source 1..23: mol_type = other DNA
  modified_base 1: mod_base = OTHER; note = 2'-O-methyladenosine-3'-phosphorothioate
  modified_base 2: mod_base = OTHER; note = 2'-deoxy-2'-fluorouridine-3'-phosphorothioate
  modified_base 3: mod_base = OTHER; note = 2'-O-methyluridine-3'-phosphate
  modified_base 4: mod_base = OTHER; note = 2'-O-methylcytidine-3'-phosphate
  modified_base 6: mod_base = OTHER; note = 2'-O-methyluridine-3'-phosphate
  modified_base 7: mod_base = OTHER; note = Thymidine-glycol nucleic acid (GNA), S-Isomer
  modified_base 8: mod_base = OTHER; note = 2'-O-methyluridine-3'-phosphate
  modified_base 9: mod_base = OTHER; note = 2'-O-methylcytidine-3'-phosphate
  modified_base 10: mod_base = OTHER; note = 2'-O-methylcytidine-3'-phosphate
  modified_base 11: mod_base = OTHER; note = 2'-O-methyladenosine-3'-phosphate
  modified_base 12: mod_base = OTHER; note = 2'-O-methylcytidine-3'-phosphate
  modified_base 13: mod_base = OTHER; note = 2'-O-methylcytidine-3'-phosphate
  modified_base 14: mod_base = OTHER; note = 2'-deoxy-2'-fluorouridine-3'-phosphate
  modified_base 15: mod_base = OTHER; note = 2'-O-methyluridine-3'-phosphate
  modified_base 16: mod_base = OTHER; note = 2'-deoxy-2'-fluorouridine-3'-phosphate
  modified_base 17: mod_base = OTHER; note = 2'-O-methylguanosine-3'-phosphate
  modified_base 18: mod_base = OTHER; note = 2'-O-methylcytidine-3'-phosphate
  modified_base 19: mod_base = OTHER; note = 2'-O-methylcytidine-3'-phosphate
  modified_base 20: mod_base = OTHER; note = 2'-O-methylcytidine-3'-phosphate
  modified_base 21: mod_base = OTHER; note = 2'-O-methyladenosine-3'-phosphorothioate
  modified_base 22: mod_base = OTHER; note = 2'-O-methyladenosine-3'-phosphorothioate
  modified_base 23: mod_base = OTHER; note = 2'-O-methylguanosine
  misc_feature 1..4: note = RNA
  misc_feature 6..23: note = RNA
  misc_feature 5: note = DNA
attcatttccacctttgcccaag

SEQ ID NO: 1233 - RNA, 23 nt, synthetic construct
  source 1..23: mol_type = other RNA
  modified_base 1: mod_base = OTHER; note = 2'-O-methyladenosine-3'-phosphorothioate
  modified_base 2: mod_base = OTHER; note = 2'-deoxy-2'-fluorocytidine-3'-phosphorothioate
  modified_base 3: mod_base = OTHER; note = 2'-O-methyluridine-3'-phosphate
  modified_base 4: mod_base = OTHER; note = 2'-O-methyluridine-3'-phosphate
  modified_base 5: mod_base = OTHER; note = 2'-O-methylcytidine-3'-phosphate
  modified_base 6: mod_base = OTHER; note = 2'-deoxy-2'-fluoroadenosine-3'-phosphate
  modified_base 7: mod_base = OTHER; note = 2'-O-methyluridine-3'-phosphate
  modified_base 8: mod_base = OTHER; note = 2'-O-methyluridine-3'-phosphate
  modified_base 9: mod_base = OTHER; note = 2'-O-methyluridine-3'-phosphate
  modified_base 10: mod_base = OTHER; note = 2'-O-methylcytidine-3'-phosphate
  modified_base 11: mod_base = OTHER; note = 2'-O-methylcytidine-3'-phosphate
  modified_base 12: mod_base = OTHER; note = 2'-O-methyladenosine-3'-phosphate
  modified_base 13: mod_base = OTHER; note = 2'-O-methylcytidine-3'-phosphate
  modified_base 14: mod_base = OTHER; note = 2'-deoxy-2'-fluorocytidine-3'-phosphate
  modified_base 15: mod_base = OTHER; note = 2'-O-methyluridine-3'-phosphate
  modified_base 16: mod_base = OTHER; note = 2'-deoxy-2'-fluorouridine-3'-phosphate
  modified_base 17: mod_base = OTHER; note = 2'-O-methyluridine-3'-phosphate
  modified_base 18: mod_base = OTHER; note = 2'-O-methylguanosine-3'-phosphate
  modified_base 19: mod_base = OTHER; note = 2'-O-methylcytidine-3'-phosphate
  modified_base 20: mod_base = OTHER; note = 2'-O-methylcytidine-3'-phosphate
  modified_base 21: mod_base = OTHER; note = 2'-O-methylcytidine-3'-phosphorothioate
  modified_base 22: mod_base = OTHER; note = 2'-O-methyladenosine-3'-phosphorothioate
  modified_base 23: mod_base = OTHER; note = 2'-O-methyladenosine
acttcatttccacctttgcccaa

SEQ ID NO: 1234 - DNA, 23 bp, synthetic construct
  source 1..23: mol_type = other DNA
  modified_base 1: mod_base = OTHER; note = 2'-O-methyluridine-3'-phosphorothioate
  modified_base 2: mod_base = OTHER; note = 2'-deoxy-2'-fluorouridine-3'-phosphorothioate
  modified_base 3: mod_base = OTHER; note = 2'-O-methylcytidine-3'-phosphate
  modified_base 4: mod_base = OTHER; note = 2'-O-methyluridine-3'-phosphate
  modified_base 6: mod_base = OTHER; note = 2'-O-methylcytidine-3'-phosphate
  modified_base 7: mod_base = OTHER; note = Adenosine-glycol nucleic acid (GNA), S-isomer
  modified_base 8: mod_base = OTHER; note = 2'-O-methyluridine-3'-phosphate
  modified_base 9: mod_base = OTHER; note = 2'-O-methyluridine-3'-phosphate
  modified_base 10: mod_base = OTHER; note = 2'-O-methyluridine-3'-phosphate
  modified_base 11: mod_base = OTHER; note = 2'-O-methylcytidine-3'-phosphate
  modified_base 12: mod_base = OTHER; note = 2'-O-methylcytidine-3'-phosphate
  modified_base 13: mod_base = OTHER; note = 2'-O-methyladenosine-3'-phosphate
  modified_base 14: mod_base = OTHER; note = 2'-deoxy-2'-fluorocytidine-3'-phosphate
  modified_base 15: mod_base = OTHER; note = 2'-O-methylcytidine-3'-phosphate
  modified_base 16: mod_base = OTHER; note = 2'-deoxy-2'-fluorouridine-3'-phosphate
  modified_base 17: mod_base = OTHER; note = 2'-O-methyluridine-3'-phosphate
  modified_base 18: mod_base = OTHER; note = 2'-O-methyluridine-3'-phosphate
  modified_base 19: mod_base = OTHER; note = 2'-O-methylguanosine-3'-phosphate
  modified_base 20: mod_base = OTHER; note = 2'-O-methylcytidine-3'-phosphate
  modified_base 21: mod_base = OTHER; note = 2'-O-methylcytidine-3'-phosphorothioate
  modified_base 22: mod_base = OTHER; note = 2'-O-methylcytidine-3'-phosphorothioate
  modified_base 23: mod_base = OTHER; note = 2'-O-methyladenosine
  misc_feature 1..4: note = RNA
  misc_feature 6..23: note = RNA
  misc_feature 5: note = DNA
ttcttcatttccacctttgccca

SEQ ID NO: 1235 - DNA, 23 bp, synthetic construct
  source 1..23: mol_type = other DNA
  modified_base 1: mod_base = OTHER; note = 2'-O-methyluridine-3'-phosphorothioate
  modified_base 2: mod_base = OTHER; note = 2'-deoxy-2'-fluorouridine-3'-phosphorothioate
  modified_base 3: mod_base = OTHER; note = 2'-O-methyluridine-3'-phosphate
  modified_base 4: mod_base = OTHER; note = 2'-O-methylcytidine-3'-phosphate
  modified_base 6: mod_base = OTHER; note = 2'-O-methyluridine-3'-phosphate
  modified_base 7: mod_base = OTHER; note = cytidine-2'-phosphate
  modified_base 8: mod_base = OTHER; note = 2'-O-methyladenosine-3'-phosphate
  modified_base 9: mod_base = OTHER; note = 2'-O-methyluridine-3'-phosphate
  modified_base 10: mod_base = OTHER; note = 2'-O-methyluridine-3'-phosphate
  modified_base 11: mod_base = OTHER; note = 2'-O-methyluridine-3'-phosphate
  modified_base 12: mod_base = OTHER; note = 2'-O-methylcytidine-3'-phosphate
  modified_base 13: mod_base = OTHER; note = 2'-O-methylcytidine-3'-phosphate
  modified_base 14: mod_base = OTHER; note = 2'-deoxy-2'-fluoroadenosine-3'-phosphate
  modified_base 15: mod_base = OTHER; note = 2'-O-methylcytidine-3'-phosphate
  modified_base 16: mod_base = OTHER; note = 2'-deoxy-2'-fluorocytidine-3'-phosphate
  modified_base 17: mod_base = OTHER; note = 2'-O-methyluridine-3'-phosphate
  modified_base 18: mod_base = OTHER; note = 2'-O-methyluridine-3'-phosphate
  modified_base 19: mod_base = OTHER; note = 2'-O-methyluridine-3'-phosphate
  modified_base 20: mod_base = OTHER; note = 2'-O-methylguanosine-3'-phosphate
  modified_base 21: mod_base = OTHER; note = 2'-O-methylcytidine-3'-phosphorothioate
  modified_base 22: mod_base = OTHER; note = 2'-O-methylcytidine-3'-phosphorothioate
  modified_base 23: mod_base = OTHER; note = 2'-O-methylcytidine
  misc_feature 1..4: note = RNA
  misc_feature 6..23: note = RNA
  misc_feature 5: note = DNA
tttcttcatttccacctttgccc

SEQ ID NO: 1236 - DNA, 23 bp, synthetic construct
  source 1..23: mol_type = other DNA
  modified_base 1: mod_base = OTHER; note = 2'-O-methyladenosine-3'-phosphorothioate
  modified_base 2: mod_base = OTHER; note = 2'-deoxy-2'-fluorouridine-3'-phosphorothioate
  modified_base 3: mod_base = OTHER; note = 2'-O-methyluridine-3'-phosphate
  modified_base 4: mod_base = OTHER; note = 2'-O-methyluridine-3'-phosphate
  modified_base 6: mod_base = OTHER; note = 2'-O-methyluridine-3'-phosphate
  modified_base 7: mod_base = OTHER; note = Thymidine-glycol nucleic acid (GNA), S-Isomer
  modified_base 8: mod_base = OTHER; note = 2'-O-methylcytidine-3'-phosphate
  modified_base 9: mod_base = OTHER; note = 2'-O-methyladenosine-3'-phosphate
  modified_base 10: mod_base = OTHER; note = 2'-O-methyluridine-3'-phosphate
  modified_base 11: mod_base = OTHER; note = 2'-O-methyluridine-3'-phosphate
  modified_base 12: mod_base = OTHER; note = 2'-O-methyluridine-3'-phosphate
  modified_base 13: mod_base = OTHER; note = 2'-O-methylcytidine-3'-phosphate
  modified_base 14: mod_base = OTHER; note = 2'-deoxy-2'-fluorocytidine-3'-phosphate
  modified_base 15: mod_base = OTHER; note = 2'-O-methyladenosine-3'-phosphate
  modified_base 16: mod_base = OTHER; note = 2'-deoxy-2'-fluorocytidine-3'-phosphate
  modified_base 17: mod_base = OTHER; note = 2'-O-methylcytidine-3'-phosphate
  modified_base 18: mod_base = OTHER; note = 2'-O-methyluridine-3'-phosphate
  modified_base 19: mod_base = OTHER; note = 2'-O-methyluridine-3'-phosphate
  modified_base 20: mod_base = OTHER; note = 2'-O-methyluridine-3'-phosphate
  modified_base 21: mod_base = OTHER; note = 2'-O-methylguanosine-3'-phosphorothioate
  modified_base 22: mod_base = OTHER; note = 2'-O-methylcytidine-3'-phosphorothioate
  modified_base 23: mod_base = OTHER; note = 2'-O-methylcytidine
  misc_feature 1..4: note = RNA
  misc_feature 6..23: note = RNA
  misc_feature 5: note = DNA
atttcttcatttccacctttgcc

SEQ ID NO: 1237 - DNA, 23 bp, synthetic construct
  source 1..23: mol_type = other DNA
  modified_base 1: mod_base = OTHER; note = 2'-O-methyladenosine-3'-phosphorothioate
  modified_base 2: mod_base = OTHER; note = 2'-deoxy-2'-fluorocytidine-3'-phosphorothioate
  modified_base 3: mod_base = OTHER; note = 2'-O-methyluridine-3'-phosphate
  modified_base 4: mod_base = OTHER; note = 2'-O-methyluridine-3'-phosphate
  modified_base 6: mod_base = OTHER; note = 2'-O-methylcytidine-3'-phosphate
  modified_base 7: mod_base = OTHER; note = Thymidine-glycol nucleic acid (GNA), S-Isomer
  modified_base 8: mod_base = OTHER; note = 2'-O-methyluridine-3'-phosphate
  modified_base 9: mod_base = OTHER; note = 2'-O-methylcytidine-3'-phosphate
  modified_base 10: mod_base = OTHER; note = 2'-O-methyladenosine-3'-phosphate
  modified_base 11: mod_base = OTHER; note = 2'-O-methyluridine-3'-phosphate
  modified_base 12: mod_base = OTHER; note = 2'-O-methyluridine-3'-phosphate
  modified_base 13: mod_base = OTHER; note = 2'-O-methyluridine-3'-phosphate
  modified_base 14: mod_base = OTHER; note = 2'-deoxy-2'-fluorocytidine-3'-phosphate
  modified_base 15: mod_base = OTHER; note = 2'-O-methylcytidine-3'-phosphate
  modified_base 16: mod_base = OTHER; note = 2'-deoxy-2'-fluoroadenosine-3'-phosphate
  modified_base 17: mod_base = OTHER; note = 2'-O-methylcytidine-3'-phosphate
  modified_base 18: mod_base = OTHER; note = 2'-O-methylcytidine-3'-phosphate
  modified_base 19: mod_base = OTHER; note = 2'-O-methyluridine-3'-phosphate
  modified_base 20: mod_base = OTHER; note = 2'-O-methyluridine-3'-phosphate
  modified_base 21: mod_base = OTHER; note = 2'-O-methyluridine-3'-phosphorothioate
  modified_base 22: mod_base = OTHER; note = 2'-O-methylguanosine-3'-phosphorothioate
  modified_base 23: mod_base = OTHER; note = 2'-O-methylcytidine
  misc_feature 1..4: note = RNA
  misc_feature 6..23: note = RNA
  misc_feature 5: note = DNA
actttcttcatttccacctttgc

SEQ ID NO: 1238 - DNA, 23 bp, synthetic construct
  source 1..23: mol_type = other DNA
  modified_base 1: mod_base = OTHER; note = 2'-O-methyluridine-3'-phosphorothioate
  modified_base 2: mod_base = OTHER; note = 2'-deoxy-2'-fluoroadenosine-3'-phosphorothioate
  modified_base 3: mod_base = OTHER; note = 2'-O-methylcytidine-3'-phosphate
  modified_base 4: mod_base = OTHER; note = 2'-O-methyluridine-3'-phosphate
  modified_base 6: mod_base = OTHER; note = 2'-O-methyluridine-3'-phosphate
  modified_base 7: mod_base = OTHER; note = cytidine-2'-phosphate
  modified_base 8: mod_base = OTHER; note = 2'-O-methyluridine-3'-phosphate
  modified_base 9: mod_base = OTHER; note = 2'-O-methyluridine-3'-phosphate
  modified_base 10: mod_base = OTHER; note = 2'-O-methylcytidine-3'-phosphate
  modified_base 11: mod_base = OTHER; note = 2'-O-methyladenosine-3'-phosphate
  modified_base 12: mod_base = OTHER; note = 2'-O-methyluridine-3'-phosphate
  modified_base 13: mod_base = OTHER; note = 2'-O-methyluridine-3'-phosphate
  modified_base 14: mod_base = OTHER; note = 2'-deoxy-2'-fluorouridine-3'-phosphate
  modified_base 15: mod_base = OTHER; note = 2'-O-methylcytidine-3'-phosphate
  modified_base 16: mod_base = OTHER; note = 2'-deoxy-2'-fluorocytidine-3'-phosphate
  modified_base 17: mod_base = OTHER; note = 2'-O-methyladenosine-3'-phosphate
  modified_base 18: mod_base = OTHER; note = 2'-O-methylcytidine-3'-phosphate
  modified_base 19: mod_base = OTHER; note = 2'-O-methylcytidine-3'-phosphate
  modified_base 20: mod_base = OTHER; note = 2'-O-methyluridine-3'-phosphate
  modified_base 21: mod_base = OTHER; note = 2'-O-methyluridine-3'-phosphorothioate
  modified_base 22: mod_base = OTHER; note = 2'-O-methyluridine-3'-phosphorothioate
  modified_base 23: mod_base = OTHER; note = 2'-O-methylguanosine
  misc_feature 1..4: note = RNA
  misc_feature 6..23: note = RNA
  misc_feature 5: note = DNA
tactttcttcatttccacctttg

SEQ ID NO: 1239 - DNA, 23 bp, synthetic construct
  source 1..23: mol_type = other DNA
  modified_base 1: mod_base = OTHER; note = 2'-O-methyladenosine-3'-phosphorothioate
  modified_base 2: mod_base = OTHER; note = 2'-deoxy-2'-fluorouridine-3'-phosphorothioate
  modified_base 3: mod_base = OTHER; note = 2'-O-methyladenosine-3'-phosphate
  modified_base 4: mod_base = OTHER; note = 2'-O-methylcytidine-3'-phosphate
  modified_base 6: mod_base = OTHER; note = 2'-O-methyluridine-3'-phosphate
  modified_base 7: mod_base = OTHER; note = Thymidine-glycol nucleic acid (GNA), S-Isomer
  modified_base 8: mod_base = OTHER; note = 2'-O-methylcytidine-3'-phosphate
  modified_base 9: mod_base = OTHER; note = 2'-O-methyluridine-3'-phosphate
  modified_base 10: mod_base = OTHER; note = 2'-O-methyluridine-3'-phosphate
  modified_base 11: mod_base = OTHER; note = 2'-O-methylcytidine-3'-phosphate
  modified_base 12: mod_base = OTHER; note = 2'-O-methyladenosine-3'-phosphate
  modified_base 13: mod_base = OTHER; note = 2'-O-methyluridine-3'-phosphate
  modified_base 14: mod_base = OTHER; note = 2'-deoxy-2'-fluorouridine-3'-phosphate
  modified_base 15: mod_base = OTHER; note = 2'-O-methyluridine-3'-phosphate
  modified_base 16: mod_base = OTHER; note = 2'-deoxy-2'-fluorocytidine-3'-phosphate
  modified_base 17: mod_base = OTHER; note = 2'-O-methylcytidine-3'-phosphate
  modified_base 18: mod_base = OTHER; note = 2'-O-methyladenosine-3'-phosphate
  modified_base 19: mod_base = OTHER; note = 2'-O-methylcytidine-3'-phosphate
  modified_base 20: mod_base = OTHER; note = 2'-O-methylcytidine-3'-phosphate
  modified_base 21: mod_base = OTHER; note = 2'-O-methyluridine-3'-phosphorothioate
  modified_base 22: mod_base = OTHER; note = 2'-O-methyluridine-3'-phosphorothioate
  modified_base 23: mod_base = OTHER; note = 2'-O-methyluridine
  misc_feature 1..4: note = RNA
  misc_feature 6..23: note = RNA
  misc_feature 5: note = DNA
atactttcttcatttccaccttt

SEQ ID NO: 1240 - RNA, 23 nt, synthetic construct
  source 1..23: mol_type = other RNA
  modified_base 1: mod_base = OTHER; note = 2'-O-methyladenosine-3'-phosphorothioate
  modified_base 2: mod_base = OTHER; note = 2'-deoxy-2'-fluoroguanosine-3'-phosphorothioate
  modified_base 3: mod_base = OTHER; note = 2'-O-methyluridine-3'-phosphate
  modified_base 4: mod_base = OTHER; note = 2'-O-methyladenosine-3'-phosphate
  modified_base 5: mod_base = OTHER; note = 2'-O-methylcytidine-3'-phosphate
  modified_base 6: mod_base = OTHER; note = 2'-deoxy-2'-fluorouridine-3'-phosphate
  modified_base 7: mod_base = OTHER; note = 2'-O-methyluridine-3'-phosphate
  modified_base 8: mod_base = OTHER; note = 2'-O-methyluridine-3'-phosphate
  modified_base 9: mod_base = OTHER; note = 2'-O-methylcytidine-3'-phosphate
  modified_base 10: mod_base = OTHER; note = 2'-O-methyluridine-3'-phosphate
  modified_base 11: mod_base = OTHER; note = 2'-O-methyluridine-3'-phosphate
  modified_base 12: mod_base = OTHER; note = 2'-O-methylcytidine-3'-phosphate
  modified_base 13: mod_base = OTHER; note = 2'-O-methyladenosine-3'-phosphate
  modified_base 14: mod_base = OTHER; note = 2'-deoxy-2'-fluorouridine-3'-phosphate
  modified_base 15: mod_base = OTHER; note = 2'-O-methyluridine-3'-phosphate
  modified_base 16: mod_base = OTHER; note = 2'-deoxy-2'-fluorouridine-3'-phosphate
  modified_base 17: mod_base = OTHER; note = 2'-O-methylcytidine-3'-phosphate
  modified_base 18: mod_base = OTHER; note = 2'-O-methylcytidine-3'-phosphate
  modified_base 19: mod_base = OTHER; note = 2'-O-methyladenosine-3'-phosphate
  modified_base 20: mod_base = OTHER; note = 2'-O-methylcytidine-3'-phosphate
  modified_base 21: mod_base = OTHER; note = 2'-O-methylcytidine-3'-phosphorothioate
  modified_base 22: mod_base = OTHER; note = 2'-O-methyluridine-3'-phosphorothioate
  modified_base 23: mod_base = OTHER; note = 2'-O-methyluridine
agtactttcttcatttccacctt

SEQ ID NO: 1241 - DNA, 23 bp, synthetic construct
  source 1..23: mol_type = other DNA
  modified_base 1: mod_base = OTHER; note = 2'-O-methyluridine-3'-phosphorothioate
  modified_base 2: mod_base = OTHER; note = 2'-deoxy-2'-fluorouridine-3'-phosphorothioate
  modified_base 3: mod_base = OTHER; note = 2'-O-methylguanosine-3'-phosphate
  modified_base 4: mod_base = OTHER; note = 2'-O-methyluridine-3'-phosphate
  modified_base 6: mod_base = OTHER; note = 2'-O-methylcytidine-3'-phosphate
  modified_base 7: mod_base = OTHER; note = Thymidine-glycol nucleic acid (GNA), S-Isomer
  modified_base 8: mod_base = OTHER; note = 2'-O-methyluridine-3'-phosphate
  modified_base 9: mod_base = OTHER; note = 2'-O-methyluridine-3'-phosphate
  modified_base 10: mod_base = OTHER; note = 2'-O-methylcytidine-3'-phosphate
  modified_base 11: mod_base = OTHER; note = 2'-O-methyluridine-3'-phosphate
  modified_base 12: mod_base = OTHER; note = 2'-O-methyluridine-3'-phosphate
  modified_base 13: mod_base = OTHER; note = 2'-O-methylcytidine-3'-phosphate
  modified_base 14: mod_base = OTHER; note = 2'-deoxy-2'-fluoroadenosine-3'-phosphate
  modified_base 15: mod_base = OTHER; note = 2'-O-methyluridine-3'-phosphate
  modified_base 16: mod_base = OTHER; note = 2'-deoxy-2'-fluorouridine-3'-phosphate
  modified_base 17: mod_base = OTHER; note = 2'-O-methyluridine-3'-phosphate
  modified_base 18: mod_base = OTHER; note = 2'-O-methylcytidine-3'-phosphate
  modified_base 19: mod_base = OTHER; note = 2'-O-methylcytidine-3'-phosphate
  modified_base 20: mod_base = OTHER; note = 2'-O-methyladenosine-3'-phosphate
  modified_base 21: mod_base = OTHER; note = 2'-O-methylcytidine-3'-phosphorothioate
  modified_base 22: mod_base = OTHER; note = 2'-O-methylcytidine-3'-phosphorothioate
  modified_base 23: mod_base = OTHER; note = 2'-O-methyluridine
  misc_feature 1..4: note = RNA
  misc_feature 6..23: note = RNA
  misc_feature 5: note = DNA
ttgtactttcttcatttccacct

SEQ ID NO: 1242 - DNA, 23 bp, synthetic construct
  source 1..23: mol_type = other DNA
  modified_base 1: mod_base = OTHER; note = 2'-O-methyluridine-3'-phosphorothioate
  modified_base 2: mod_base = OTHER; note = 2'-deoxy-2'-fluorouridine-3'-phosphorothioate
  modified_base 3: mod_base = OTHER; note = 2'-O-methyluridine-3'-phosphate
  modified_base 4: mod_base = OTHER; note = 2'-O-methylguanosine-3'-phosphate
  modified_base 6: mod_base = OTHER; note = 2'-O-methyladenosine-3'-phosphate
  modified_base 7: mod_base = OTHER; note = cytidine-2'-phosphate
  modified_base 8: mod_base = OTHER; note = 2'-O-methyluridine-3'-phosphate
  modified_base 9: mod_base = OTHER; note = 2'-O-methyluridine-3'-phosphate
  modified_base 10: mod_base = OTHER; note = 2'-O-methyluridine-3'-phosphate
  modified_base 11: mod_base = OTHER; note = 2'-O-methylcytidine-3'-phosphate
  modified_base 12: mod_base = OTHER; note = 2'-O-methyluridine-3'-phosphate
  modified_base 13: mod_base = OTHER; note = 2'-O-methyluridine-3'-phosphate
  modified_base 14: mod_base = OTHER; note = 2'-deoxy-2'-fluorocytidine-3'-phosphate
  modified_base 15: mod_base = OTHER; note = 2'-O-methyladenosine-3'-phosphate
  modified_base 16: mod_base = OTHER; note = 2'-deoxy-2'-fluorouridine-3'-phosphate
  modified_base 17: mod_base = OTHER; note = 2'-O-methyluridine-3'-phosphate
  modified_base 18: mod_base = OTHER; note = 2'-O-methyluridine-3'-phosphate
  modified_base 19: mod_base = OTHER; note = 2'-O-methylcytidine-3'-phosphate
  modified_base 20: mod_base = OTHER; note = 2'-O-methylcytidine-3'-phosphate
  modified_base 21: mod_base = OTHER; note = 2'-O-methyladenosine-3'-phosphorothioate
  modified_base 22: mod_base = OTHER; note = 2'-O-methylcytidine-3'-phosphorothioate
  modified_base 23: mod_base = OTHER; note = 2'-O-methylcytidine
  misc_feature 1..4: note = RNA
  misc_feature 6..23: note = RNA
  misc_feature 5: note = DNA
tttgtactttcttcatttccacc

SEQ ID NO: 1243 - DNA, 23 bp, synthetic construct
  source 1..23: mol_type = other DNA
  modified_base 1: mod_base = OTHER; note = 2'-O-methyladenosine-3'-phosphorothioate
  modified_base 2: mod_base = OTHER; note = 2'-deoxy-2'-fluorouridine-3'-phosphorothioate
  modified_base 3: mod_base = OTHER; note = 2'-O-methyluridine-3'-phosphate
  modified_base 4: mod_base = OTHER; note = 2'-O-methyluridine-3'-phosphate
  modified_base 6: mod_base = OTHER; note = 2'-O-methyluridine-3'-phosphate
  modified_base 7: mod_base = OTHER; note = Adenosine-glycol nucleic acid (GNA), S-isomer
  modified_base 8: mod_base = OTHER; note = 2'-O-methylcytidine-3'-phosphate
  modified_base 9: mod_base = OTHER; note = 2'-O-methyluridine-3'-phosphate
  modified_base 10: mod_base = OTHER; note = 2'-O-methyluridine-3'-phosphate
  modified_base 11: mod_base = OTHER; note = 2'-O-methyluridine-3'-phosphate
  modified_base 12: mod_base = OTHER; note = 2'-O-methylcytidine-3'-phosphate
  modified_base 13: mod_base = OTHER; note = 2'-O-methyluridine-3'-phosphate
  modified_base 14: mod_base = OTHER; note = 2'-deoxy-2'-fluorouridine-3'-phosphate
  modified_base 15: mod_base = OTHER; note = 2'-O-methylcytidine-3'-phosphate
  modified_base 16: mod_base = OTHER; note = 2'-deoxy-2'-fluoroadenosine-3'-phosphate
  modified_base 17: mod_base = OTHER; note = 2'-O-methyluridine-3'-phosphate
  modified_base 18: mod_base = OTHER; note = 2'-O-methyluridine-3'-phosphate
  modified_base 19: mod_base = OTHER; note = 2'-O-methyluridine-3'-phosphate
  modified_base 20: mod_base = OTHER; note = 2'-O-methylcytidine-3'-phosphate
  modified_base 21: mod_base = OTHER; note = 2'-O-methylcytidine-3'-phosphorothioate
  modified_base 22: mod_base = OTHER; note = 2'-O-methyladenosine-3'-phosphorothioate
  modified_base 23: mod_base = OTHER; note = 2'-O-methylcytidine
  misc_feature 1..4: note = RNA
  misc_feature 6..23: note = RNA
  misc_feature 5: note = DNA
atttgtactttcttcatttccac

SEQ ID NO: 1244 - DNA, 23 bp, synthetic construct
  source 1..23: mol_type = other DNA
  modified_base 1: mod_base = OTHER; note = 2'-O-methyluridine-3'-phosphorothioate
  modified_base 2: mod_base = OTHER; note = 2'-deoxy-2'-fluorocytidine-3'-phosphorothioate
  modified_base 3: mod_base = OTHER; note = 2'-O-methyluridine-3'-phosphate
  modified_base 4: mod_base = OTHER; note = 2'-O-methyluridine-3'-phosphate
  modified_base 6: mod_base = OTHER; note = 2'-O-methylguanosine-3'-phosphate
  modified_base 7: mod_base = OTHER; note = Thymidine-glycol nucleic acid (GNA), S-Isomer
  modified_base 8: mod_base = OTHER; note = 2'-O-methyladenosine-3'-phosphate
  modified_base 9: mod_base = OTHER; note = 2'-O-methylcytidine-3'-phosphate
  modified_base 10: mod_base = OTHER; note = 2'-O-methyluridine-3'-phosphate
  modified_base 11: mod_base = OTHER; note = 2'-O-methyluridine-3'-phosphate
  modified_base 12: mod_base = OTHER; note = 2'-O-methyluridine-3'-phosphate
  modified_base 13: mod_base = OTHER; note = 2'-O-methylcytidine-3'-phosphate
  modified_base 14: mod_base = OTHER; note = 2'-deoxy-2'-fluorouridine-3'-phosphate
  modified_base 15: mod_base = OTHER; note = 2'-O-methyluridine-3'-phosphate
  modified_base 16: mod_base = OTHER; note = 2'-deoxy-2'-fluorocytidine-3'-phosphate
  modified_base 17: mod_base = OTHER; note = 2'-O-methyladenosine-3'-phosphate
  modified_base 18: mod_base = OTHER; note = 2'-O-methyluridine-3'-phosphate
  modified_base 19: mod_base = OTHER; note = 2'-O-methyluridine-3'-phosphate
  modified_base 20: mod_base = OTHER; note = 2'-O-methyluridine-3'-phosphate
  modified_base 21: mod_base = OTHER; note = 2'-O-methylcytidine-3'-phosphorothioate
  modified_base 22: mod_base = OTHER; note = 2'-O-methylcytidine-3'-phosphorothioate
  modified_base 23: mod_base = OTHER; note = 2'-O-methyladenosine
  misc_feature 1..4: note = RNA
  misc_feature 6..23: note = RNA
  misc_feature 5: note = DNA
tctttgtactttcttcatttcca

SEQ ID NO: 1245 - DNA, 23 bp, synthetic construct
  source 1..23: mol_type = other DNA
  modified_base 1: mod_base = OTHER; note = 2'-O-methyladenosine-3'-phosphorothioate
  modified_base 2: mod_base = OTHER; note = 2'-deoxy-2'-fluorouridine-3'-phosphorothioate
  modified_base 3: mod_base = OTHER; note = 2'-O-methylcytidine-3'-phosphate
  modified_base 4: mod_base = OTHER; note = 2'-O-methyluridine-3'-phosphate
  modified_base 6: mod_base = OTHER; note = 2'-O-methyluridine-3'-phosphate
  modified_base 7: mod_base = OTHER; note = guanosine-2'-phosphate
  modified_base 8: mod_base = OTHER; note = 2'-O-methyluridine-3'-phosphate
  modified_base 9: mod_base = OTHER; note = 2'-O-methyladenosine-3'-phosphate
  modified_base 10: mod_base = OTHER; note = 2'-O-methylcytidine-3'-phosphate
  modified_base 11: mod_base = OTHER; note = 2'-O-methyluridine-3'-phosphate
  modified_base 12: mod_base = OTHER; note = 2'-O-methyluridine-3'-phosphate
  modified_base 13: mod_base = OTHER; note = 2'-O-methyluridine-3'-phosphate
  modified_base 14: mod_base = OTHER; note = 2'-deoxy-2'-fluorocytidine-3'-phosphate
  modified_base 15: mod_base = OTHER; note = 2'-O-methyluridine-3'-phosphate
  modified_base 16: mod_base = OTHER; note = 2'-deoxy-2'-fluorouridine-3'-phosphate
  modified_base 17: mod_base = OTHER; note = 2'-O-methylcytidine-3'-phosphate
  modified_base 18: mod_base = OTHER; note = 2'-O-methyladenosine-3'-phosphate
  modified_base 19: mod_base = OTHER; note = 2'-O-methyluridine-3'-phosphate
  modified_base 20: mod_base = OTHER; note = 2'-O-methyluridine-3'-phosphate
  modified_base 21: mod_base = OTHER; note = 2'-O-methyluridine-3'-phosphorothioate
  modified_base 22: mod_base = OTHER; note = 2'-O-methylcytidine-3'-phosphorothioate
  modified_base 23: mod_base = OTHER; note = 2'-O-methylcytidine
  misc_feature 1..4: note = RNA
  misc_feature 6..23: note = RNA
  misc_feature 5: note = DNA
atctttgtactttcttcatttcc

SEQ ID NO: 1246 - DNA, 23 bp, synthetic construct
  source 1..23: mol_type = other DNA
  modified_base 1: mod_base = OTHER; note = 2'-O-methyluridine-3'-phosphorothioate
  modified_base 2: mod_base = OTHER; note = 2'-deoxy-2'-fluoroguanosine-3'-phosphorothioate
  modified_base 3: mod_base = OTHER; note = 2'-O-methyluridine-3'-phosphate
  modified_base 4: mod_base = OTHER; note = 2'-O-methylcytidine-3'-phosphate
  modified_base 6: mod_base = OTHER; note = 2'-O-methyluridine-3'-phosphate
  modified_base 7: mod_base = OTHER; note = Thymidine-glycol nucleic acid (GNA), S-Isomer
  modified_base 8: mod_base = OTHER; note = 2'-O-methylguanosine-3'-phosphate
  modified_base 9: mod_base = OTHER; note = 2'-O-methyluridine-3'-phosphate
  modified_base 10: mod_base = OTHER; note = 2'-O-methyladenosine-3'-phosphate
  modified_base 11: mod_base = OTHER; note = 2'-O-methylcytidine-3'-phosphate
  modified_base 12: mod_base = OTHER; note = 2'-O-methyluridine-3'-phosphate
  modified_base 13: mod_base = OTHER; note = 2'-O-methyluridine-3'-phosphate
  modified_base 14: mod_base = OTHER; note = 2'-deoxy-2'-fluorouridine-3'-phosphate
  modified_base 15: mod_base = OTHER; note = 2'-O-methylcytidine-3'-phosphate
  modified_base 16: mod_base = OTHER; note = 2'-deoxy-2'-fluorouridine-3'-phosphate
  modified_base 17: mod_base = OTHER; note = 2'-O-methyluridine-3'-phosphate
  modified_base 18: mod_base = OTHER; note = 2'-O-methylcytidine-3'-phosphate
  modified_base 19: mod_base = OTHER; note = 2'-O-methyladenosine-3'-phosphate
  modified_base 20: mod_base = OTHER; note = 2'-O-methyluridine-3'-phosphate
  modified_base 21: mod_base = OTHER; note = 2'-O-methyluridine-3'-phosphorothioate
  modified_base 22: mod_base = OTHER; note = 2'-O-methyluridine-3'-phosphorothioate
  modified_base 23: mod_base = OTHER; note = 2'-O-methylcytidine
  misc_feature 1..4: note = RNA
  misc_feature 6..23: note = RNA
  misc_feature 5: note = DNA
tgtctttgtactttcttcatttc

SEQ ID NO: 1247 - RNA, 23 nt, synthetic construct
  source 1..23: mol_type = other RNA
caccatcaatttcgagcagaagg

SEQ ID NO: 1248 - RNA, 23 nt, synthetic construct
  source 1..23: mol_type = other RNA
accatcaatttcgagcagaagga

SEQ ID NO: 1249 - RNA, 23 nt, synthetic construct
  source 1..23: mol_type = other RNA
cgagcagaaggaaagtaatggac

SEQ ID NO: 1250 - RNA, 23 nt, synthetic construct
  source 1..23: mol_type = other RNA
gagcagaaggaaagtaatggacc

SEQ ID NO: 1251 - RNA, 23 nt, synthetic construct
  source 1..23: mol_type = other RNA
aagtaatggaccagtgaaggtgt

SEQ ID NO: 1252 - RNA, 23 nt, synthetic construct
  source 1..23: mol_type = other RNA
gtaatggaccagtgaaggtgtgg

SEQ ID NO: 1253 - RNA, 23 nt, synthetic construct
  source 1..23: mol_type = other RNA
ctgtaccagtgcaggtcctcact

SEQ ID NO: 1254 - RNA, 23 nt, synthetic construct
  source 1..23: mol_type = other RNA
tgtaccagtgcaggtcctcactt

SEQ ID NO: 1255 - RNA, 23 nt, synthetic construct
  source 1..23: mol_type = other RNA
cggtgggccaaaggatgaagaga

SEQ ID NO: 1256 - RNA, 23 nt, synthetic construct
  source 1..23: mol_type = other RNA
ggtgggccaaaggatgaagagag

SEQ ID NO: 1257 - RNA, 23 nt, synthetic construct
  source 1..23: mol_type = other RNA
gtgggccaaaggatgaagagagg

SEQ ID NO: 1258 - RNA, 23 nt, synthetic construct
  source 1..23: mol_type = other RNA
tgggccaaaggatgaagagaggc

SEQ ID NO: 1259 - RNA, 23 nt, synthetic construct
  source 1..23: mol_type = other RNA
gggccaaaggatgaagagaggca

SEQ ID NO: 1260 - RNA, 23 nt, synthetic construct
  source 1..23: mol_type = other RNA
ggccaaaggatgaagagaggcat

SEQ ID NO: 1261 - RNA, 23 nt, synthetic construct
  source 1..23: mol_type = other RNA
ccaaaggatgaagagaggcatgt

SEQ ID NO: 1262 - RNA, 23 nt, synthetic construct
  source 1..23: mol_type = other RNA
gatgaagagaggcatgttggaga

SEQ ID NO: 1263 - RNA, 23 nt, synthetic construct
  source 1..23: mol_type = other RNA
gaagagaggcatgttggagacct

SEQ ID NO: 1264 - RNA, 23 nt, synthetic construct
  source 1..23: mol_type = other RNA
agagaggcatgttggagacctgg

SEQ ID NO: 1265 - RNA, 23 nt, synthetic construct
  source 1..23: mol_type = other RNA
agcagatgacttgggcaaaggtg

SEQ ID NO: 1266 - RNA, 23 nt, synthetic construct
  source 1..23: mol_type = other RNA
gacttgggcaaaggtggaaatga

SEQ ID NO: 1267 - RNA, 23 nt, synthetic construct
  source 1..23: mol_type = other RNA
cttgggcaaaggtggaaatgaag

SEQ ID NO: 1268 - RNA, 23 nt, synthetic construct
  source 1..23: mol_type = other RNA
ttgggcaaaggtggaaatgaaga

SEQ ID NO: 1269 - RNA, 23 nt, synthetic construct
  source 1..23: mol_type = other RNA
tgggcaaaggtggaaatgaagaa

SEQ ID NO: 1270 - RNA, 23 nt, synthetic construct
  source 1..23: mol_type = other RNA
gggcaaaggtggaaatgaagaaa

SEQ ID NO: 1271 - RNA, 23 nt, synthetic construct
  source 1..23: mol_type = other RNA
ggcaaaggtggaaatgaagaaag

SEQ ID NO: 1272 - RNA, 23 nt, synthetic construct
  source 1..23: mol_type = other RNA
gcaaaggtggaaatgaagaaagt

SEQ ID NO: 1273 - RNA, 23 nt, synthetic construct
  source 1..23: mol_type = other RNA
aaaggtggaaatgaagaaagtaa

SEQ ID NO: 1274 - RNA, 23 nt, synthetic construct
  source 1..23: mol_type = other RNA
aggtggaaatgaagaaagtaaaa

SEQ ID NO: 1275 - RNA, 23 nt, synthetic construct
  source 1..23: mol_type = other RNA
ggtggaaatgaagaaagtaaaaa

SEQ ID NO: 1276 - RNA, 23 nt, synthetic construct
  source 1..23: mol_type = other RNA
gtggaaatgaagaaagtaaaaag

SEQ ID NO: 1277 - RNA, 23 nt, synthetic construct
  source 1..23: mol_type = other RNA
tggaaatgaagaaagtaaaaaga

SEQ ID NO: 1278 - RNA, 23 nt, synthetic construct
  source 1..23: mol_type = other RNA
ggaaatgaagaaagtaaaaagac

SEQ ID NO: 1279 - RNA, 23 nt, synthetic construct
  source 1..23: mol_type = other RNA
gaaatgaagaaagtaaaaagaca

SEQ ID NO: 1280 - RNA, 21 nt, synthetic construct
  source 1..21: mol_type = other RNA
aatttcgagcagaaggaaaga

SEQ ID NO: 1281 - RNA, 21 nt, synthetic construct
  source 1..21: mol_type = other RNA
ttcgagcagaaggaaagtaaa

SEQ ID NO: 1282 - RNA, 21 nt, synthetic construct
  source 1..21: mol_type = other RNA
aaggaaagtaatggaccagta

SEQ ID NO: 1283 - RNA, 21 nt, synthetic construct
  source 1..21: mol_type = other RNA
gaaagtaatggaccagtgaaa

SEQ ID NO: 1284 - RNA, 21 nt, synthetic construct
  source 1..21: mol_type = other RNA
caggtcctcactttaatccta

SEQ ID NO: 1285 - RNA, 21 nt, synthetic construct
  source 1..21: mol_type = other RNA
cctcactttaatcctctatca

SEQ ID NO: 1286 - RNA, 21 nt, synthetic construct
  source 1..21: mol_type = other RNA
aaggatgaagagaggcatgta

SEQ ID NO: 1287 - RNA, 21 nt, synthetic construct
  source 1..21: mol_type = other RNA
aggatgaagagaggcatgtta

SEQ ID NO: 1288 - RNA, 21 nt, synthetic construct
  source 1..21: mol_type = other RNA
aggtggaaatgaagaaagtaa

SEQ ID NO: 1289 - RNA, 23 nt, synthetic construct
  source 1..23: mol_type = other RNA
  modified_base 5: mod_base = OTHER; note = 5'-methyluridine-3'-phosphate
ttccttctgctcgaaattgatgg

SEQ ID NO: 1290 - RNA, 23 nt, synthetic construct
  source 1..23: mol_type = other RNA
  modified_base 2: mod_base = OTHER; note = 5'-methyluridine-3'-phosphate
  modified_base 5: mod_base = OTHER; note = 5'-methyluridine-3'-phosphate
ttccttctgctcgaaattgatgg

SEQ ID NO: 1291 - RNA, 23 nt, synthetic construct
  source 1..23: mol_type = other RNA
  modified_base 5: mod_base = OTHER; note = 5'-methyluridine-3'-phosphate
tctttccttctgctcgaaattgg

SEQ ID NO: 1292 - RNA, 23 nt, synthetic construct
  source 1..23: mol_type = other RNA
  modified_base 7: mod_base = OTHER; note = 5'-methyluridine-3'-phosphate
tttactttccttctgctcgaaat

SEQ ID NO: 1293 - RNA, 23 nt, synthetic construct
  source 1..23: mol_type = other RNA
  modified_base 2: mod_base = OTHER; note = 5'-methyluridine-3'-phosphate
  modified_base 7: mod_base = OTHER; note = 5'-methyluridine-3'-phosphate
  modified_base 12: mod_base = OTHER; note = 5'-methyluridine-3'-phosphate
tttactttccttctgctcgaaat

SEQ ID NO: 1294 - RNA, 23 nt, synthetic construct
  source 1..23: mol_type = other RNA
  modified_base 7: mod_base = OTHER; note = 5'-methyluridine-3'-phosphate
tactggtccattactttccttct

SEQ ID NO: 1295 - RNA, 23 nt, synthetic construct
  source 1..23: mol_type = other RNA
  modified_base 7: mod_base = OTHER; note = 5'-methyluridine-3'-phosphate
  modified_base 12: mod_base = OTHER; note = 5'-methyluridine-3'-phosphate
tactggtccattactttccttct

SEQ ID NO: 1296 - RNA, 23 nt, synthetic construct
  source 1..23: mol_type = other RNA
  modified_base 7: mod_base = OTHER; note = 5'-methyluridine-3'-phosphate
  modified_base 12: mod_base = OTHER; note = 5'-methyluridine-3'-phosphate
  modified_base 16: mod_base = OTHER; note = 5'-methyluridine-3'-phosphate
tactggtccattactttccttct

SEQ ID NO: 1297 - RNA, 23 nt, synthetic construct
  source 1..23: mol_type = other RNA
  modified_base 5: mod_base = OTHER; note = 5'-methyluridine-3'-phosphate
  modified_base 12: mod_base = OTHER; note = 5'-methyluridine-3'-phosphate
tcactggtccattactttccttc

SEQ ID NO: 1298 - RNA, 23 nt, synthetic construct
  source 1..23: mol_type = other RNA
  modified_base 5: mod_base = OTHER; note = 5'-methyluridine-3'-phosphate
  modified_base 12: mod_base = OTHER; note = 5'-methyluridine-3'-phosphate
  modified_base 16: mod_base = OTHER; note = 5'-methyluridine-3'-phosphate
tcactggtccattactttccttc

SEQ ID NO: 1299 - RNA, 23 nt, synthetic construct
  source 1..23: mol_type = other RNA
  modified_base 7: mod_base = OTHER; note = 5'-methyluridine-3'-phosphate
tttcactggtccattactttcct

SEQ ID NO: 1300 - RNA, 23 nt, synthetic construct
  source 1..23: mol_type = other RNA
  modified_base 2: mod_base = OTHER; note = 5'-methyluridine-3'-phosphate
  modified_base 7: mod_base = OTHER; note = 5'-methyluridine-3'-phosphate
tttcactggtccattactttcct

SEQ ID NO: 1301 - RNA, 23 nt, synthetic construct
  source 1..23: mol_type = other RNA
taaagtgaggacctgcactggtg

SEQ ID NO: 1302 - RNA, 23 nt, synthetic construct
  source 1..23: mol_type = other RNA
  modified_base 7: mod_base = OTHER; note = 5'-methyluridine-3'-phosphate
  modified_base 12: mod_base = OTHER; note = 5'-methyluridine-3'-phosphate
taggattaaagtgaggacctgcg

SEQ ID NO: 1303 - RNA, 23 nt, synthetic construct
  source 1..23: mol_type = other RNA
tgatagaggattaaagtgaggac

SEQ ID NO: 1304 - RNA, 23 nt, synthetic construct
  source 1..23: mol_type = other RNA
  modified_base 12: mod_base = OTHER; note = 5'-methyluridine-3'-phosphate
tgatagaggattaaagtgaggac

SEQ ID NO: 1305 - RNA, 23 nt, synthetic construct
  source 1..23: mol_type = other RNA
  modified_base 7: mod_base = OTHER; note = 5'-methyluridine-3'-phosphate
  modified_base 14: mod_base = OTHER; note = 5'-methyluridine-3'-phosphate
tctggatagaggattaaagtgag

SEQ ID NO: 1306 - RNA, 23 nt, synthetic construct
  source 1..23: mol_type = other RNA
  modified_base 5: mod_base = OTHER; note = 5'-methyluridine-3'-phosphate
tacatgcctctcttcatcctttg

SEQ ID NO: 1307 - RNA, 23 nt, synthetic construct
  source 1..23: mol_type = other RNA
taacatgcctctcttcatccttt

SEQ ID NO: 1308 - RNA, 23 nt, synthetic construct
  source 1..23: mol_type = other RNA
  modified_base 12: mod_base = OTHER; note = 5'-methyluridine-3'-phosphate
taacatgcctctcttcatccttt

SEQ ID NO: 1309 - RNA, 23 nt, synthetic construct
  source 1..23: mol_type = other RNA
  modified_base 2: mod_base = OTHER; note = 5'-methyluridine-3'-phosphate
  modified_base 5: mod_base = OTHER; note = 5'-methyluridine-3'-phosphate
  modified_base 7: mod_base = OTHER; note = 5'-methyluridine-3'-phosphate
ttcatttccacctttgcccaagt

SEQ ID NO: 1310 - RNA, 23 nt, synthetic construct
  source 1..23: mol_type = other RNA
  modified_base 2: mod_base = OTHER; note = 5'-methyluridine-3'-phosphate
  modified_base 5: mod_base = OTHER; note = 5'-methyluridine-3'-phosphate
tttcttcatttccacctttgccc

SEQ ID NO: 1311 - RNA, 23 nt, synthetic construct
  source 1..23: mol_type = other RNA
  modified_base 5: mod_base = OTHER; note = 5'-methyluridine-3'-phosphate
  modified_base 7: mod_base = OTHER; note = 5'-methyluridine-3'-phosphate
ttactttcttcatttccaccttt

SEQ ID NO: 1312 - RNA, 23 nt, synthetic construct
  source 1..23: mol_type = other RNA
  modified_base 2: mod_base = OTHER; note = 5'-methyluridine-3'-phosphate
  modified_base 5: mod_base = OTHER; note = 5'-methyluridine-3'-phosphate
  modified_base 7: mod_base = OTHER; note = 5'-methyluridine-3'-phosphate
ttactttcttcatttccaccttt

SEQ ID NO: 1313 - RNA, 21 nt, synthetic construct
  source 1..21: mol_type = other RNA
  modified_base 1: mod_base = OTHER; note = 2'-O-methyladenosine-3'-phosphorothioate
  modified_base 2: mod_base = OTHER; note = 2'-O-methyluridine-3'-phosphorothioate
  modified_base 3: mod_base = OTHER; note = 2'-O-methylcytidine-3'-phosphate
  modified_base 4: mod_base = OTHER; note = 2'-O-methyladenosine-3'-phosphate
  modified_base 5: mod_base = OTHER; note = 2'-O-methyladenosine-3'-phosphate
  modified_base 6: mod_base = OTHER; note = 2'-O-hexadecyl-uridine-3'-phosphate
  modified_base 7: mod_base = OTHER; note = 2'-O-methyluridine-3'-phosphate
  modified_base 8: mod_base = OTHER; note = 2'-O-methyluridine-3'-phosphate
  modified_base 9: mod_base = OTHER; note = 2'-deoxy-2'-fluorocytidine-3'-phosphate
  modified_base 10: mod_base = OTHER; note = 2'-O-methylguanosine-3'-phosphate
  modified_base 11: mod_base = OTHER; note = 2'-deoxy-2'-fluoroadenosine-3'-phosphate
  modified_base 12: mod_base = OTHER; note = 2'-O-methylguanosine-3'-phosphate
  modified_base 13: mod_base = OTHER; note = 2'-O-methylcytidine-3'-phosphate
  modified_base 14: mod_base = OTHER; note = 2'-O-methyladenosine-3'-phosphate
  modified_base 15: mod_base = OTHER; note = 2'-O-methylguanosine-3'-phosphate
  modified_base 16: mod_base = OTHER; note = 2'-O-methyladenosine-3'-phosphate
  modified_base 17: mod_base = OTHER; note = 2'-O-methyladenosine-3'-phosphate
  modified_base 18: mod_base = OTHER; note = 2'-O-methylguanosine-3'-phosphate
  modified_base 19: mod_base = OTHER; note = 2'-O-methylguanosine-3'-phosphorothioate
  modified_base 20: mod_base = OTHER; note = 2'-O-methyladenosine-3'-phosphorothioate
  modified_base 21: mod_base = OTHER; note = 2'-O-methyladenosine
atcaatttcgagcagaaggaa

SEQ ID NO: 1314 - DNA, 21 bp, synthetic construct
  source 1..21: mol_type = other DNA
  modified_base 1: mod_base = OTHER; note = 2'-O-methyladenosine-3'-phosphorothioate
  modified_base 2: mod_base = OTHER; note = 2'-O-methyluridine-3'-phosphorothioate
  modified_base 3: mod_base = OTHER; note = 2'-O-methylcytidine-3'-phosphate
  modified_base 4: mod_base = OTHER; note = 2'-O-methyladenosine-3'-phosphate
  modified_base 5: mod_base = OTHER; note = 2'-O-methyladenosine-3'-phosphate
  modified_base 6: mod_base = OTHER; note = 2'-O-hexadecyl-uridine-3'-phosphate
  modified_base 7: mod_base = OTHER; note = 2'-O-methyluridine-3'-phosphate
  modified_base 8: mod_base = OTHER; note = 2'-O-methyluridine-3'-phosphate
  modified_base 9: mod_base = OTHER; note = 2'-deoxy-2'-fluorocytidine-3'-phosphate
  modified_base 10: mod_base = OTHER; note = 2'-O-methylguanosine-3'-phosphate
  modified_base 11: mod_base = OTHER; note = 2'-deoxy-2'-fluoroadenosine-3'-phosphate
  modified_base 13: mod_base = OTHER; note = 2'-O-methylcytidine-3'-phosphate
  modified_base 14: mod_base = OTHER; note = 2'-O-methyladenosine-3'-phosphate
  modified_base 15: mod_base = OTHER; note = 2'-O-methylguanosine-3'-phosphate
  modified_base 16: mod_base = OTHER; note = 2'-O-methyladenosine-3'-phosphate
  modified_base 17: mod_base = OTHER; note = 2'-O-methyladenosine-3'-phosphate
  modified_base 18: mod_base = OTHER; note = 2'-O-methylguanosine-3'-phosphate
  modified_base 19: mod_base = OTHER; note = 2'-O-methylguanosine-3'-phosphorothioate
  modified_base 20: mod_base = OTHER; note = 2'-O-methyladenosine-3'-phosphorothioate
  modified_base 21: mod_base = OTHER; note = 2'-O-methyladenosine
  misc_feature 1..11: note = RNA
  misc_feature 13..21: note = RNA
  misc_feature 12: note = DNA
atcaatttcgagcagaaggaa

SEQ ID NO: 1315 - RNA, 21 nt, synthetic construct
  source 1..21: mol_type = other RNA
  modified_base 1: mod_base = OTHER; note = 2'-O-methyladenosine-3'-phosphorothioate
  modified_base 2: mod_base = OTHER; note = 2'-O-methyladenosine-3'-phosphorothioate
  modified_base 3: mod_base = OTHER; note = 2'-O-methyluridine-3'-phosphate
  modified_base 4: mod_base = OTHER; note = 2'-O-methyluridine-3'-phosphate
  modified_base 5: mod_base = OTHER; note = 2'-O-methyluridine-3'-phosphate
  modified_base 6: mod_base = OTHER; note = 2'-O-hexadecyl-cytidine-3'-phosphate
  modified_base 7: mod_base = OTHER; note = 2'-O-methylguanosine-3'-phosphate
  modified_base 8: mod_base = OTHER; note = 2'-O-methyladenosine-3'-phosphate
  modified_base 9: mod_base = OTHER; note = 2'-O-methylguanosine-3'-phosphate
  modified_base 10: mod_base = OTHER; note = 2'-deoxy-2'-fluorocytidine-3'-phosphate
  modified_base 11: mod_base = OTHER; note = 2'-deoxy-2'-fluoroadenosine-3'-phosphate
  modified_base 12: mod_base = OTHER; note = 2'-O-methylguanosine-3'-phosphate
  modified_base 13: mod_base = OTHER; note = 2'-O-methyladenosine-3'-phosphate
  modified_base 14: mod_base = OTHER; note = 2'-O-methyladenosine-3'-phosphate
  modified_base 15: mod_base = OTHER; note = 2'-O-methylguanosine-3'-phosphate
  modified_base 16: mod_base = OTHER; note = 2'-O-methylguanosine-3'-phosphate
  modified_base 17: mod_base = OTHER; note = 2'-O-methyladenosine-3'-phosphate
  modified_base 18: mod_base = OTHER; note = 2'-O-methyladenosine-3'-phosphate
  modified_base 19: mod_base = OTHER; note = 2'-O-methyladenosine-3'-phosphorothioate
  modified_base 20: mod_base = OTHER; note = 2'-O-methylguanosine-3'-phosphorothioate
  modified_base 21: mod_base = OTHER; note = 2'-O-methyladenosine
aatttcgagcagaaggaaaga

SEQ ID NO: 1316 - DNA, 21 bp, synthetic construct
  source 1..21: mol_type = other DNA
  modified_base 1: mod_base = OTHER; note = 2'-O-methyladenosine-3'-phosphorothioate
  modified_base 2: mod_base = OTHER; note = 2'-O-methyladenosine-3'-phosphorothioate
  modified_base 3: mod_base = OTHER; note = 2'-O-methyluridine-3'-phosphate
  modified_base 4: mod_base = OTHER; note = 2'-O-methyluridine-3'-phosphate
  modified_base 5: mod_base = OTHER; note = 2'-O-methyluridine-3'-phosphate
  modified_base 6: mod_base = OTHER; note = 2'-O-hexadecyl-cytidine-3'-phosphate
  modified_base 7: mod_base = OTHER; note = 2'-O-methylguanosine-3'-phosphate
  modified_base 8: mod_base = OTHER; note = 2'-O-methyladenosine-3'-phosphate
  modified_base 10: mod_base = OTHER; note = 2'-O-methylcytidine-3'-phosphate
  modified_base 11: mod_base = OTHER; note = 2'-deoxy-2'-fluoroadenosine-3'-phosphate
  modified_base 13: mod_base = OTHER; note = 2'-O-methyladenosine-3'-phosphate
  modified_base 14: mod_base = OTHER; note = 2'-O-methyladenosine-3'-phosphate
  modified_base 15: mod_base = OTHER; note = 2'-O-methylguanosine-3'-phosphate
  modified_base 16: mod_base = OTHER; note = 2'-O-methylguanosine-3'-phosphate
  modified_base 17: mod_base = OTHER; note = 2'-O-methyladenosine-3'-phosphate
  modified_base 18: mod_base = OTHER; note = 2'-O-methyladenosine-3'-phosphate
  modified_base 19: mod_base = OTHER; note = 2'-O-methyladenosine-3'-phosphorothioate
  modified_base 20: mod_base = OTHER; note = 2'-O-methylguanosine-3'-phosphorothioate
  modified_base 21: mod_base = OTHER; note = 2'-O-methyladenosine
  misc_feature 1..8: note = RNA
  misc_feature 10..11: note = RNA
  misc_feature 13..21: note = RNA
  misc_feature 9: note = DNA
  misc_feature 12: note = DNA
aatttcgagcagaaggaaaga

SEQ ID NO: 1317 - RNA, 21 nt, synthetic construct
  source 1..21: mol_type = other RNA
  modified_base 1: mod_base = OTHER; note = 2'-O-methyluridine-3'-phosphorothioate
  modified_base 2: mod_base = OTHER; note = 2'-O-methyluridine-3'-phosphorothioate
  modified_base 3: mod_base = OTHER; note = 2'-O-methylcytidine-3'-phosphate
  modified_base 4: mod_base = OTHER; note = 2'-O-methylguanosine-3'-phosphate
  modified_base 5: mod_base = OTHER; note = 2'-O-methyladenosine-3'-phosphate
  modified_base 6: mod_base = OTHER; note = 2'-O-methylguanosine-3'-phosphate
  modified_base 7: mod_base = OTHER; note = 2'-O-hexadecyl-cytidine-3'-phosphate
  modified_base 8: mod_base = OTHER; note = 2'-O-methyladenosine-3'-phosphate
  modified_base 9: mod_base = OTHER; note = 2'-deoxy-2'-fluoroguanosine-3'-phosphate
  modified_base 10: mod_base = OTHER; note = 2'-deoxy-2'-fluoroadenosine-3'-phosphate
  modified_base 11: mod_base = OTHER; note = 2'-deoxy-2'-fluoroadenosine-3'-phosphate
  modified_base 12: mod_base = OTHER; note = 2'-O-methylguanosine-3'-phosphate
  modified_base 13: mod_base = OTHER; note = 2'-O-methylguanosine-3'-phosphate
  modified_base 14: mod_base = OTHER; note = 2'-O-methyladenosine-3'-phosphate
  modified_base 15: mod_base = OTHER; note = 2'-O-methyladenosine-3'-phosphate
  modified_base 16: mod_base = OTHER; note = 2'-O-methyladenosine-3'-phosphate
  modified_base 17: mod_base = OTHER; note = 2'-O-methylguanosine-3'-phosphate
  modified_base 18: mod_base = OTHER; note = 2'-O-methyluridine-3'-phosphate
  modified_base 19: mod_base = OTHER; note = 2'-O-methyladenosine-3'-phosphate
  modified_base 20: mod_base = OTHER; note = 2'-O-methyladenosine-3'-phosphate
  modified_base 21: mod_base = OTHER; note = 2'-O-methyluridine-3'-phosphate ((2S,4R)-1-[29-[[2-(acetylamino)-2-deoxy-beta-D-galactopyra nosyl]oxy]-14,14-bis[[3-[[3-[[5-[[2-(acetylamino)-2-deoxy-b eta-D-galactopyranosyl]oxy]-1-oxopentyl]amino]propyl]amino] -3-oxopropoxy]methyl]-1,12,19,25-tetraoxo-16-oxa-13,20,24-t riazanonacos-1-yl]-4-hydroxy-2-pyrrolidinyl)methyl ester
ttcgagcagaaggaaagtaat

SEQ ID NO: 1318 - RNA, 21 nt, synthetic construct
  source 1..21: mol_type = other RNA
  modified_base 1: mod_base = OTHER; note = 2'-O-methyluridine-3'-phosphorothioate
  modified_base 2: mod_base = OTHER; note = 2'-O-methyluridine-3'-phosphorothioate
  modified_base 3: mod_base = OTHER; note = 2'-O-methylcytidine-3'-phosphate
  modified_base 4: mod_base = OTHER; note = 2'-O-methylguanosine-3'-phosphate
  modified_base 5: mod_base = OTHER; note = 2'-O-methyladenosine-3'-phosphate
  modified_base 6: mod_base = OTHER; note = 2'-O-methylguanosine-3'-phosphate
  modified_base 7: mod_base = OTHER; note = 2'-O-hexadecyl-cytidine-3'-phosphate
  modified_base 8: mod_base = OTHER; note = 2'-O-methyladenosine-3'-phosphate
  modified_base 9: mod_base = OTHER; note = 2'-O-methylguanosine-3'-phosphate
  modified_base 10: mod_base = OTHER; note = 2'-deoxy-2'-fluoroadenosine-3'-phosphate
  modified_base 11: mod_base = OTHER; note = 2'-deoxy-2'-fluoroadenosine-3'-phosphate
  modified_base 12: mod_base = OTHER; note = 2'-O-methylguanosine-3'-phosphate
  modified_base 13: mod_base = OTHER; note = 2'-O-methylguanosine-3'-phosphate
  modified_base 14: mod_base = OTHER; note = 2'-O-methyladenosine-3'-phosphate
  modified_base 15: mod_base = OTHER; note = 2'-O-methyladenosine-3'-phosphate
  modified_base 16: mod_base = OTHER; note = 2'-O-methyladenosine-3'-phosphate
  modified_base 17: mod_base = OTHER; note = 2'-O-methylguanosine-3'-phosphate
  modified_base 18: mod_base = OTHER; note = 2'-O-methyluridine-3'-phosphate
  modified_base 19: mod_base = OTHER; note = 2'-O-methyladenosine-3'-phosphorothioate
  modified_base 20: mod_base = OTHER; note = 2'-O-methyladenosine-3'-phosphorothioate
  modified_base 21: mod_base = OTHER; note = 2'-O-methyladenosine
ttcgagcagaaggaaagtaaa

SEQ ID NO: 1319 - DNA, 21 bp, synthetic construct
  source 1..21: mol_type = other DNA
  modified_base 1: mod_base = OTHER; note = 2'-O-methyluridine-3'-phosphorothioate
  modified_base 2: mod_base = OTHER; note = 2'-O-methyluridine-3'-phosphorothioate
  modified_base 3: mod_base = OTHER; note = 2'-O-methylcytidine-3'-phosphate
  modified_base 4: mod_base = OTHER; note = 2'-O-methylguanosine-3'-phosphate
  modified_base 5: mod_base = OTHER; note = 2'-O-methyladenosine-3'-phosphate
  modified_base 6: mod_base = OTHER; note = 2'-O-methylguanosine-3'-phosphate
  modified_base 7: mod_base = OTHER; note = 2'-O-hexadecyl-cytidine-3'-phosphate
  modified_base 8: mod_base = OTHER; note = 2'-O-methyladenosine-3'-phosphate
  modified_base 10: mod_base = OTHER; note = 2'-O-methyladenosine-3'-phosphate
  modified_base 11: mod_base = OTHER; note = 2'-deoxy-2'-fluoroadenosine-3'-phosphate
  modified_base 13: mod_base = OTHER; note = 2'-O-methylguanosine-3'-phosphate
  modified_base 14: mod_base = OTHER; note = 2'-O-methyladenosine-3'-phosphate
  modified_base 15: mod_base = OTHER; note = 2'-O-methyladenosine-3'-phosphate
  modified_base 16: mod_base = OTHER; note = 2'-O-methyladenosine-3'-phosphate
  modified_base 17: mod_base = OTHER; note = 2'-O-methylguanosine-3'-phosphate
  modified_base 18: mod_base = OTHER; note = 2'-O-methyluridine-3'-phosphate
  modified_base 19: mod_base = OTHER; note = 2'-O-methyladenosine-3'-phosphorothioate
  modified_base 20: mod_base = OTHER; note = 2'-O-methyladenosine-3'-phosphorothioate
  modified_base 21: mod_base = OTHER; note = 2'-O-methyladenosine
  misc_feature 1..8: note = RNA
  misc_feature 10..11: note = RNA
  misc_feature 13..21: note = RNA
  misc_feature 9: note = DNA
  misc_feature 12: note = DNA
ttcgagcagaaggaaagtaaa

SEQ ID NO: 1320 - RNA, 21 nt, synthetic construct
  source 1..21: mol_type = other RNA
  modified_base 1: mod_base = OTHER; note = 2'-O-methyladenosine-3'-phosphorothioate
  modified_base 2: mod_base = OTHER; note = 2'-O-methylguanosine-3'-phosphorothioate
  modified_base 3: mod_base = OTHER; note = 2'-O-methylguanosine-3'-phosphate
  modified_base 4: mod_base = OTHER; note = 2'-O-methyladenosine-3'-phosphate
  modified_base 5: mod_base = OTHER; note = 2'-O-methyladenosine-3'-phosphate
  modified_base 6: mod_base = OTHER; note = 2'-O-hexadecyl-adenosine-3'-phosphate
  modified_base 7: mod_base = OTHER; note = 2'-O-methylguanosine-3'-phosphate
  modified_base 8: mod_base = OTHER; note = 2'-O-methyluridine-3'-phosphate
  modified_base 9: mod_base = OTHER; note = 2'-deoxy-2'-fluoroadenosine-3'-phosphate
  modified_base 10: mod_base = OTHER; note = 2'-deoxy-2'-fluoroadenosine-3'-phosphate
  modified_base 11: mod_base = OTHER; note = 2'-deoxy-2'-fluorouridine-3'-phosphate
  modified_base 12: mod_base = OTHER; note = 2'-O-methylguanosine-3'-phosphate
  modified_base 13: mod_base = OTHER; note = 2'-O-methylguanosine-3'-phosphate
  modified_base 14: mod_base = OTHER; note = 2'-O-methyladenosine-3'-phosphate
  modified_base 15: mod_base = OTHER; note = 2'-O-methylcytidine-3'-phosphate
  modified_base 16: mod_base = OTHER; note = 2'-O-methylcytidine-3'-phosphate
  modified_base 17: mod_base = OTHER; note = 2'-O-methyladenosine-3'-phosphate
  modified_base 18: mod_base = OTHER; note = 2'-O-methylguanosine-3'-phosphate
  modified_base 19: mod_base = OTHER; note = 2'-O-methyluridine-3'-phosphorothioate
  modified_base 20: mod_base = OTHER; note = 2'-O-methylguanosine-3'-phosphorothioate
  modified_base 21: mod_base = OTHER; note = 2'-O-methyladenosine
aggaaagtaatggaccagtga

SEQ ID NO: 1321 - DNA, 21 bp, synthetic construct
  source 1..21: mol_type = other DNA
  modified_base 1: mod_base = OTHER; note = 2'-O-methylguanosine-3'-phosphorothioate
  modified_base 2: mod_base = OTHER; note = 2'-O-methyladenosine-3'-phosphorothioate
  modified_base 3: mod_base = OTHER; note = 2'-O-methyladenosine-3'-phosphate
  modified_base 4: mod_base = OTHER; note = 2'-O-methyladenosine-3'-phosphate
  modified_base 5: mod_base = OTHER; note = 2'-O-methylguanosine-3'-phosphate
  modified_base 6: mod_base = OTHER; note = 2'-O-hexadecyl-uridine-3'-phosphate
  modified_base 7: mod_base = OTHER; note = 2'-O-methyladenosine-3'-phosphate
  modified_base 8: mod_base = OTHER; note = 2'-O-methyladenosine-3'-phosphate
  modified_base 9: mod_base = OTHER; note = 2'-deoxy-2'-fluorouridine-3'-phosphate
  modified_base 10: mod_base = OTHER; note = 2'-O-methylguanosine-3'-phosphate
  modified_base 12: mod_base = OTHER; note = 2'-O-methyladenosine-3'-phosphate
  modified_base 13: mod_base = OTHER; note = 2'-O-methylcytidine-3'-phosphate
  modified_base 14: mod_base = OTHER; note = 2'-O-methylcytidine-3'-phosphate
  modified_base 15: mod_base = OTHER; note = 2'-O-methyladenosine-3'-phosphate
  modified_base 16: mod_base = OTHER; note = 2'-O-methylguanosine-3'-phosphate
  modified_base 17: mod_base = OTHER; note = 2'-O-methyluridine-3'-phosphate
  modified_base 18: mod_base = OTHER; note = 2'-O-methylguanosine-3'-phosphate
  modified_base 19: mod_base = OTHER; note = 2'-O-methyladenosine-3'-phosphorothioate
  modified_base 20: mod_base = OTHER; note = 2'-O-methyladenosine-3'-phosphorothioate
  modified_base 21: mod_base = OTHER; note = 2'-O-methyladenosine
  misc_feature 1..10: note = RNA
  misc_feature 12..21: note = RNA
  misc_feature 11: note = DNA
gaaagtaatggaccagtgaaa

SEQ ID NO: 1322 - DNA, 21 bp, synthetic construct
  source 1..21: mol_type = other DNA
  modified_base 1: mod_base = OTHER; note = 2'-O-methylguanosine-3'-phosphorothioate
  modified_base 2: mod_base = OTHER; note = 2'-O-methyladenosine-3'-phosphorothioate
  modified_base 3: mod_base = OTHER; note = 2'-O-methyladenosine-3'-phosphate
  modified_base 4: mod_base = OTHER; note = 2'-O-methyladenosine-3'-phosphate
  modified_base 5: mod_base = OTHER; note = 2'-O-methylguanosine-3'-phosphate
  modified_base 6: mod_base = OTHER; note = 2'-O-hexadecyl-uridine-3'-phosphate
  modified_base 7: mod_base = OTHER; note = 2'-O-methyladenosine-3'-phosphate
  modified_base 8: mod_base = OTHER; note = 2'-O-methyladenosine-3'-phosphate
  modified_base 9: mod_base = OTHER; note = 2'-deoxy-2'-fluorouridine-3'-phosphate
  modified_base 10: mod_base = OTHER; note = 2'-O-methylguanosine-3'-phosphate
  modified_base 12: mod_base = OTHER; note = 2'-deoxy-2'-fluoroadenosine-3'-phosphate
  modified_base 13: mod_base = OTHER; note = 2'-O-methylcytidine-3'-phosphate
  modified_base 14: mod_base = OTHER; note = 2'-O-methylcytidine-3'-phosphate
  modified_base 15: mod_base = OTHER; note = 2'-O-methyladenosine-3'-phosphate
  modified_base 16: mod_base = OTHER; note = 2'-O-methylguanosine-3'-phosphate
  modified_base 17: mod_base = OTHER; note = 2'-O-methyluridine-3'-phosphate
  modified_base 18: mod_base = OTHER; note = 2'-O-methylguanosine-3'-phosphate
  modified_base 19: mod_base = OTHER; note = 2'-O-methyladenosine-3'-phosphorothioate
  modified_base 20: mod_base = OTHER; note = 2'-O-methyladenosine-3'-phosphorothioate
  modified_base 21: mod_base = OTHER; note = 2'-O-methyladenosine
  misc_feature 1..10: note = RNA
  misc_feature 12..21: note = RNA
  misc_feature 11: note = DNA
gaaagtaatggaccagtgaaa

SEQ ID NO: 1323 - RNA, 21 nt, synthetic construct
  source 1..21: mol_type = other RNA
  modified_base 1: mod_base = OTHER; note = 2'-O-methylcytidine-3'-phosphorothioate
  modified_base 2: mod_base = OTHER; note = 2'-O-methylcytidine-3'-phosphorothioate
  modified_base 3: mod_base = OTHER; note = 2'-O-methyladenosine-3'-phosphate
  modified_base 4: mod_base = OTHER; note = 2'-O-methylguanosine-3'-phosphate
  modified_base 5: mod_base = OTHER; note = 2'-O-methyluridine-3'-phosphate
  modified_base 6: mod_base = OTHER; note = 2'-O-methylguanosine-3'-phosphate
  modified_base 7: mod_base = OTHER; note = 2'-O-hexadecyl-cytidine-3'-phosphate
  modified_base 8: mod_base = OTHER; note = 2'-O-methyladenosine-3'-phosphate
  modified_base 9: mod_base = OTHER; note = 2'-deoxy-2'-fluoroguanosine-3'-phosphate
  modified_base 10: mod_base = OTHER; note = 2'-deoxy-2'-fluoroguanosine-3'-phosphate
  modified_base 11: mod_base = OTHER; note = 2'-deoxy-2'-fluorouridine-3'-phosphate
  modified_base 12: mod_base = OTHER; note = 2'-O-methylcytidine-3'-phosphate
  modified_base 13: mod_base = OTHER; note = 2'-O-methylcytidine-3'-phosphate
  modified_base 14: mod_base = OTHER; note = 2'-O-methyluridine-3'-phosphate
  modified_base 15: mod_base = OTHER; note = 2'-O-methylcytidine-3'-phosphate
  modified_base 16: mod_base = OTHER; note = 2'-O-methyladenosine-3'-phosphate
  modified_base 17: mod_base = OTHER; note = 2'-O-methylcytidine-3'-phosphate
  modified_base 18: mod_base = OTHER; note = 2'-O-methyluridine-3'-phosphate
  modified_base 19: mod_base = OTHER; note = 2'-O-methyluridine-3'-phosphate
  modified_base 20: mod_base = OTHER; note = 2'-O-methyluridine-3'-phosphate
  modified_base 21: mod_base = OTHER; note = 2'-O-methyladenosine-3'-phosphate ((2S,4R)-1-[29-[[2-(acetylamino)-2-deoxy-beta-D-galactopyra nosyl]oxy]-14,14-bis[[3-[[3-[[5-[[2-(acetylamino)-2-deoxy-b eta-D-galactopyranosyl]oxy]-1-oxopentyl]amino]propyl]amino] -3-oxopropoxy]methyl]-1,12,19,25-tetraoxo-16-oxa-13,20,24-t riazanonacos-1-yl]-4-hydroxy-2-pyrrolidinyl)methyl ester
ccagtgcaggtcctcacttta

SEQ ID NO: 1324 - RNA, 21 nt, synthetic construct
  source 1..21: mol_type = other RNA
  modified_base 1: mod_base = OTHER; note = 2'-O-methylcytidine-3'-phosphorothioate
  modified_base 2: mod_base = OTHER; note = 2'-O-methylcytidine-3'-phosphorothioate
  modified_base 3: mod_base = OTHER; note = 2'-O-methyladenosine-3'-phosphate
  modified_base 4: mod_base = OTHER; note = 2'-O-methylguanosine-3'-phosphate
  modified_base 5: mod_base = OTHER; note = 2'-O-methyluridine-3'-phosphate
  modified_base 6: mod_base = OTHER; note = 2'-O-methylguanosine-3'-phosphate
  modified_base 7: mod_base = OTHER; note = 2'-O-hexadecyl-cytidine-3'-phosphate
  modified_base 8: mod_base = OTHER; note = 2'-O-methyladenosine-3'-phosphate
  modified_base 9: mod_base = OTHER; note = 2'-deoxy-2'-fluoroguanosine-3'-phosphate
  modified_base 10: mod_base = OTHER; note = 2'-deoxy-2'-fluoroguanosine-3'-phosphate
  modified_base 11: mod_base = OTHER; note = 2'-deoxy-2'-fluorouridine-3'-phosphate
  modified_base 12: mod_base = OTHER; note = 2'-O-methylcytidine-3'-phosphate
  modified_base 13: mod_base = OTHER; note = 2'-O-methylcytidine-3'-phosphate
  modified_base 14: mod_base = OTHER; note = 2'-O-methyluridine-3'-phosphate
  modified_base 15: mod_base = OTHER; note = 2'-O-methylcytidine-3'-phosphate
  modified_base 16: mod_base = OTHER; note = 2'-O-methyladenosine-3'-phosphate
  modified_base 17: mod_base = OTHER; note = 2'-O-methylcytidine-3'-phosphate
  modified_base 18: mod_base = OTHER; note = 2'-O-methyluridine-3'-phosphate
  modified_base 19: mod_base = OTHER; note = 2'-O-methyluridine-3'-phosphorothioate
  modified_base 20: mod_base = OTHER; note = 2'-O-methyluridine-3'-phosphorothioate
  modified_base 21: mod_base = OTHER; note = 2'-O-methyladenosine
ccagtgcaggtcctcacttta

SEQ ID NO: 1325 - DNA, 21 bp, synthetic construct
  source 1..21: mol_type = other DNA
  modified_base 1: mod_base = OTHER; note = 2'-O-methylcytidine-3'-phosphorothioate
  modified_base 2: mod_base = OTHER; note = 2'-O-methylcytidine-3'-phosphorothioate
  modified_base 3: mod_base = OTHER; note = 2'-O-methyladenosine-3'-phosphate
  modified_base 4: mod_base = OTHER; note = 2'-O-methylguanosine-3'-phosphate
  modified_base 5: mod_base = OTHER; note = 2'-O-methyluridine-3'-phosphate
  modified_base 6: mod_base = OTHER; note = 2'-O-methylguanosine-3'-phosphate
  modified_base 7: mod_base = OTHER; note = 2'-O-hexadecyl-cytidine-3'-phosphate
  modified_base 8: mod_base = OTHER; note = 2'-O-methyladenosine-3'-phosphate
  modified_base 10: mod_base = OTHER; note = 2'-O-methylguanosine-3'-phosphate
  modified_base 11: mod_base = OTHER; note = 2'-deoxy-2'-fluorouridine-3'-phosphate
  modified_base 12: mod_base = OTHER; note = 2'-O-methylcytidine-3'-phosphate
  modified_base 13: mod_base = OTHER; note = 2'-O-methylcytidine-3'-phosphate
  modified_base 14: mod_base = OTHER; note = 2'-O-methyluridine-3'-phosphate
  modified_base 15: mod_base = OTHER; note = 2'-O-methylcytidine-3'-phosphate
  modified_base 16: mod_base = OTHER; note = 2'-O-methyladenosine-3'-phosphate
  modified_base 17: mod_base = OTHER; note = 2'-O-methylcytidine-3'-phosphate
  modified_base 18: mod_base = OTHER; note = 2'-O-methyluridine-3'-phosphate
  modified_base 19: mod_base = OTHER; note = 2'-O-methyluridine-3'-phosphorothioate
  modified_base 20: mod_base = OTHER; note = 2'-O-methyluridine-3'-phosphorothioate
  modified_base 21: mod_base = OTHER; note = 2'-O-methyladenosine
  misc_feature 1..8: note = RNA
  misc_feature 10..21: note = RNA
  misc_feature 9: note = DNA
ccagtgcaggtcctcacttta

SEQ ID NO: 1326 - DNA, 21 bp, synthetic construct
  source 1..21: mol_type = other DNA
  modified_base 1: mod_base = OTHER; note = 2'-O-methylcytidine-3'-phosphorothioate
  modified_base 2: mod_base = OTHER; note = 2'-O-methylcytidine-3'-phosphorothioate
  modified_base 3: mod_base = OTHER; note = 2'-O-methyladenosine-3'-phosphate
  modified_base 4: mod_base = OTHER; note = 2'-O-methylguanosine-3'-phosphate
  modified_base 5: mod_base = OTHER; note = 2'-O-methyluridine-3'-phosphate
  modified_base 6: mod_base = OTHER; note = 2'-O-methylguanosine-3'-phosphate
  modified_base 7: mod_base = OTHER; note = 2'-O-hexadecyl-cytidine-3'-phosphate
  modified_base 8: mod_base = OTHER; note = 2'-O-methyladenosine-3'-phosphate
  modified_base 10: mod_base = OTHER; note = 2'-O-methylguanosine-3'-phosphate
  modified_base 11: mod_base = OTHER; note = 2'-deoxy-2'-fluorouridine-3'-phosphate
  modified_base 12: mod_base = OTHER; note = 2'-deoxy-2'-fluorocytidine-3'-phosphate
  modified_base 13: mod_base = OTHER; note = 2'-O-methylcytidine-3'-phosphate
  modified_base 14: mod_base = OTHER; note = 2'-O-methyluridine-3'-phosphate
  modified_base 15: mod_base = OTHER; note = 2'-O-methylcytidine-3'-phosphate
  modified_base 16: mod_base = OTHER; note = 2'-O-methyladenosine-3'-phosphate
  modified_base 17: mod_base = OTHER; note = 2'-O-methylcytidine-3'-phosphate
  modified_base 18: mod_base = OTHER; note = 2'-O-methyluridine-3'-phosphate
  modified_base 19: mod_base = OTHER; note = 2'-O-methyluridine-3'-phosphorothioate
  modified_base 20: mod_base = OTHER; note = 2'-O-methyluridine-3'-phosphorothioate
  modified_base 21: mod_base = OTHER; note = 2'-O-methyladenosine
  misc_feature 1..8: note = RNA
  misc_feature 10..21: note = RNA
  misc_feature 9: note = DNA
ccagtgcaggtcctcacttta

SEQ ID NO: 1327 - RNA, 21 nt, synthetic construct
  source 1..21: mol_type = other RNA
  modified_base 1: mod_base = OTHER; note = 2'-O-methylcytidine-3'-phosphorothioate
  modified_base 2: mod_base = OTHER; note = 2'-O-methyladenosine-3'-phosphorothioate
  modified_base 3: mod_base = OTHER; note = 2'-O-methylguanosine-3'-phosphate
  modified_base 4: mod_base = OTHER; note = 2'-O-methylguanosine-3'-phosphate
  modified_base 5: mod_base = OTHER; note = 2'-O-methyluridine-3'-phosphate
  modified_base 6: mod_base = OTHER; note = 2'-O-hexadecyl-cytidine-3'-phosphate
  modified_base 7: mod_base = OTHER; note = 2'-O-methylcytidine-3'-phosphate
  modified_base 8: mod_base = OTHER; note = 2'-O-methyluridine-3'-phosphate
  modified_base 9: mod_base = OTHER; note = 2'-deoxy-2'-fluorocytidine-3'-phosphate
  modified_base 10: mod_base = OTHER; note = 2'-O-methyladenosine-3'-phosphate
  modified_base 11: mod_base = OTHER; note = 2'-deoxy-2'-fluorocytidine-3'-phosphate
  modified_base 12: mod_base = OTHER; note = 2'-deoxy-2'-fluorouridine-3'-phosphate
  modified_base 13: mod_base = OTHER; note = 2'-O-methyluridine-3'-phosphate
  modified_base 14: mod_base = OTHER; note = 2'-O-methyluridine-3'-phosphate
  modified_base 15: mod_base = OTHER; note = 2'-O-methyladenosine-3'-phosphate
  modified_base 16: mod_base = OTHER; note = 2'-O-methyladenosine-3'-phosphate
  modified_base 17: mod_base = OTHER; note = 2'-O-methyluridine-3'-phosphate
  modified_base 18: mod_base = OTHER; note = 2'-O-methylcytidine-3'-phosphate
  modified_base 19: mod_base = OTHER; note = 2'-O-methylcytidine-3'-phosphorothioate
  modified_base 20: mod_base = OTHER; note = 2'-O-methyluridine-3'-phosphorothioate
  modified_base 21: mod_base = OTHER; note = 2'-O-methyladenosine
caggtcctcactttaatccta

SEQ ID NO: 1328 - DNA, 21 bp, synthetic construct
  source 1..21: mol_type = other DNA
  modified_base 1: mod_base = OTHER; note = 2'-O-methyladenosine-3'-phosphorothioate
  modified_base 2: mod_base = OTHER; note = 2'-O-methyladenosine-3'-phosphorothioate
  modified_base 3: mod_base = OTHER; note = 2'-O-methylguanosine-3'-phosphate
  modified_base 4: mod_base = OTHER; note = 2'-O-methylguanosine-3'-phosphate
  modified_base 5: mod_base = OTHER; note = 2'-O-methyladenosine-3'-phosphate
  modified_base 6: mod_base = OTHER; note = 2'-O-hexadecyl-uridine-3'-phosphate
  modified_base 7: mod_base = OTHER; note = 2'-O-methylguanosine-3'-phosphate
  modified_base 8: mod_base = OTHER; note = 2'-O-methyladenosine-3'-phosphate
  modified_base 9: mod_base = OTHER; note = 2'-deoxy-2'-fluoroadenosine-3'-phosphate
  modified_base 10: mod_base = OTHER; note = 2'-O-methylguanosine-3'-phosphate
  modified_base 11: mod_base = OTHER; note = 2'-deoxy-2'-fluoroadenosine-3'-phosphate
  modified_base 13: mod_base = OTHER; note = 2'-O-methyladenosine-3'-phosphate
  modified_base 14: mod_base = OTHER; note = 2'-O-methylguanosine-3'-phosphate
  modified_base 15: mod_base = OTHER; note = 2'-O-methylguanosine-3'-phosphate
  modified_base 16: mod_base = OTHER; note = 2'-O-methylcytidine-3'-phosphate
  modified_base 17: mod_base = OTHER; note = 2'-O-methyladenosine-3'-phosphate
  modified_base 18: mod_base = OTHER; note = 2'-O-methyluridine-3'-phosphate
  modified_base 19: mod_base = OTHER; note = 2'-O-methylguanosine-3'-phosphorothioate
  modified_base 20: mod_base = OTHER; note = 2'-O-methyluridine-3'-phosphorothioate
  modified_base 21: mod_base = OTHER; note = 2'-O-methyladenosine
  misc_feature 1..11: note = RNA
  misc_feature 13..21: note = RNA
  misc_feature 12: note = DNA
aaggatgaagagaggcatgta

SEQ ID NO: 1329 - DNA, 21 bp, synthetic construct
  source 1..21: mol_type = other DNA
  modified_base 1: mod_base = OTHER; note = 2'-O-methyladenosine-3'-phosphorothioate
  modified_base 2: mod_base = OTHER; note = 2'-O-methyladenosine-3'-phosphorothioate
  modified_base 3: mod_base = OTHER; note = 2'-O-methylguanosine-3'-phosphate
  modified_base 4: mod_base = OTHER; note = 2'-O-methylguanosine-3'-phosphate
  modified_base 5: mod_base = OTHER; note = 2'-O-methyladenosine-3'-phosphate
  modified_base 6: mod_base = OTHER; note = 2'-O-hexadecyl-uridine-3'-phosphate
  modified_base 7: mod_base = OTHER; note = 2'-O-methylguanosine-3'-phosphate
  modified_base 8: mod_base = OTHER; note = 2'-O-methyladenosine-3'-phosphate
  modified_base 10: mod_base = OTHER; note = 2'-O-methylguanosine-3'-phosphate
  modified_base 12: mod_base = OTHER; note = 2'-O-methylguanosine-3'-phosphate
  modified_base 13: mod_base = OTHER; note = 2'-O-methyladenosine-3'-phosphate
  modified_base 14: mod_base = OTHER; note = 2'-O-methylguanosine-3'-phosphate
  modified_base 15: mod_base = OTHER; note = 2'-O-methylguanosine-3'-phosphate
  modified_base 16: mod_base = OTHER; note = 2'-O-methylcytidine-3'-phosphate
  modified_base 17: mod_base = OTHER; note = 2'-O-methyladenosine-3'-phosphate
  modified_base 18: mod_base = OTHER; note = 2'-O-methyluridine-3'-phosphate
  modified_base 19: mod_base = OTHER; note = 2'-O-methylguanosine-3'-phosphorothioate
  modified_base 20: mod_base = OTHER; note = 2'-O-methyluridine-3'-phosphorothioate
  modified_base 21: mod_base = OTHER; note = 2'-O-methyladenosine
  misc_feature 1..8: note = RNA
  misc_feature 10: note = RNA
  misc_feature 12..21: note = RNA
  misc_feature 9: note = DNA
  misc_feature 11: note = DNA
aaggatgaagagaggcatgta

SEQ ID NO: 1330 - RNA, 21 nt, synthetic construct
  source 1..21: mol_type = other RNA
  modified_base 1: mod_base = OTHER; note = 2'-O-methyladenosine-3'-phosphorothioate
  modified_base 2: mod_base = OTHER; note = 2'-O-methylguanosine-3'-phosphorothioate
  modified_base 3: mod_base = OTHER; note = 2'-O-methylguanosine-3'-phosphate
  modified_base 4: mod_base = OTHER; note = 2'-O-methyladenosine-3'-phosphate
  modified_base 5: mod_base = OTHER; note = 2'-O-hexadecyl-uridine-3'-phosphate
  modified_base 6: mod_base = OTHER; note = 2'-O-methylguanosine-3'-phosphate
  modified_base 7: mod_base = OTHER; note = 2'-deoxy-2'-fluoroadenosine-3'-phosphate
  modified_base 8: mod_base = OTHER; note = 2'-O-methyladenosine-3'-phosphate
  modified_base 9: mod_base = OTHER; note = 2'-deoxy-2'-fluoroguanosine-3'-phosphate
  modified_base 10: mod_base = OTHER; note = 2'-deoxy-2'-fluoroadenosine-3'-phosphate
  modified_base 11: mod_base = OTHER; note = 2'-deoxy-2'-fluoroguanosine-3'-phosphate
  modified_base 12: mod_base = OTHER; note = 2'-O-methyladenosine-3'-phosphate
  modified_base 13: mod_base = OTHER; note = 2'-O-methylguanosine-3'-phosphate
  modified_base 14: mod_base = OTHER; note = 2'-O-methylguanosine-3'-phosphate
  modified_base 15: mod_base = OTHER; note = 2'-O-methylcytidine-3'-phosphate
  modified_base 16: mod_base = OTHER; note = 2'-O-methyladenosine-3'-phosphate
  modified_base 17: mod_base = OTHER; note = 2'-O-methyluridine-3'-phosphate
  modified_base 18: mod_base = OTHER; note = 2'-O-methylguanosine-3'-phosphate
  modified_base 19: mod_base = OTHER; note = 2'-O-methyluridine-3'-phosphate
  modified_base 20: mod_base = OTHER; note = 2'-O-methyluridine-3'-phosphate
  modified_base 21: mod_base = OTHER; note = 2'-O-methyluridine-3'-phosphate ((2S,4R)-1-[29-[[2-(acetylamino)-2-deoxy-beta-D-galactopyra nosyl]oxy]-14,14-bis[[3-[[3-[[5-[[2-(acetylamino)-2-deoxy-b eta-D-galactopyranosyl]oxy]-1-oxopentyl]amino]propyl]amino] -3-oxopropoxy]methyl]-1,12,19,25-tetraoxo-16-oxa-13,20,24-t riazanonacos-1-yl]-4-hydroxy-2-pyrrolidinyl)methyl ester
aggatgaagagaggcatgttt

SEQ ID NO: 1331 - DNA, 21 bp, synthetic construct
  source 1..21: mol_type = other DNA
  modified_base 1: mod_base = OTHER; note = 2'-O-methyladenosine-3'-phosphorothioate
  modified_base 2: mod_base = OTHER; note = 2'-O-methylguanosine-3'-phosphorothioate
  modified_base 3: mod_base = OTHER; note = 2'-O-methylguanosine-3'-phosphate
  modified_base 4: mod_base = OTHER; note = 2'-O-methyladenosine-3'-phosphate
  modified_base 5: mod_base = OTHER; note = 2'-O-hexadecyl-uridine-3'-phosphate
  modified_base 6: mod_base = OTHER; note = 2'-O-methylguanosine-3'-phosphate
  modified_base 7: mod_base = OTHER; note = 2'-O-methyladenosine-3'-phosphate
  modified_base 8: mod_base = OTHER; note = 2'-O-methyladenosine-3'-phosphate
  modified_base 10: mod_base = OTHER; note = 2'-O-methyladenosine-3'-phosphate
  modified_base 12: mod_base = OTHER; note = 2'-O-methyladenosine-3'-phosphate
  modified_base 13: mod_base = OTHER; note = 2'-O-methylguanosine-3'-phosphate
  modified_base 14: mod_base = OTHER; note = 2'-O-methylguanosine-3'-phosphate
  modified_base 15: mod_base = OTHER; note = 2'-O-methylcytidine-3'-phosphate
  modified_base 16: mod_base = OTHER; note = 2'-O-methyladenosine-3'-phosphate
  modified_base 17: mod_base = OTHER; note = 2'-O-methyluridine-3'-phosphate
  modified_base 18: mod_base = OTHER; note = 2'-O-methylguanosine-3'-phosphate
  modified_base 19: mod_base = OTHER; note = 2'-O-methyluridine-3'-phosphorothioate
  modified_base 20: mod_base = OTHER; note = 2'-O-methyluridine-3'-phosphorothioate
  modified_base 21: mod_base = OTHER; note = 2'-O-methyladenosine
  misc_feature 1..8: note = RNA
  misc_feature 10: note = RNA
  misc_feature 12..21: note = RNA
  misc_feature 9: note = DNA
  misc_feature 11: note = DNA
aggatgaagagaggcatgtta

SEQ ID NO: 1332 - DNA, 21 bp, synthetic construct
  source 1..21: mol_type = other DNA
  modified_base 1: mod_base = OTHER; note = 2'-O-methyladenosine-3'-phosphorothioate
  modified_base 2: mod_base = OTHER; note = 2'-O-methylguanosine-3'-phosphorothioate
  modified_base 3: mod_base = OTHER; note = 2'-O-methylguanosine-3'-phosphate
  modified_base 4: mod_base = OTHER; note = 2'-O-methyladenosine-3'-phosphate
  modified_base 5: mod_base = OTHER; note = 2'-O-hexadecyl-uridine-3'-phosphate
  modified_base 6: mod_base = OTHER; note = 2'-O-methylguanosine-3'-phosphate
  modified_base 7: mod_base = OTHER; note = 2'-O-methyladenosine-3'-phosphate
  modified_base 8: mod_base = OTHER; note = 2'-O-methyladenosine-3'-phosphate
  modified_base 10: mod_base = OTHER; note = 2'-O-methyladenosine-3'-phosphate
  modified_base 12: mod_base = OTHER; note = 2'-deoxy-2'-fluoroadenosine-3'-phosphate
  modified_base 13: mod_base = OTHER; note = 2'-O-methylguanosine-3'-phosphate
  modified_base 14: mod_base = OTHER; note = 2'-O-methylguanosine-3'-phosphate
  modified_base 15: mod_base = OTHER; note = 2'-O-methylcytidine-3'-phosphate
  modified_base 16: mod_base = OTHER; note = 2'-O-methyladenosine-3'-phosphate
  modified_base 17: mod_base = OTHER; note = 2'-O-methyluridine-3'-phosphate
  modified_base 18: mod_base = OTHER; note = 2'-O-methylguanosine-3'-phosphate
  modified_base 19: mod_base = OTHER; note = 2'-O-methyluridine-3'-phosphorothioate
  modified_base 20: mod_base = OTHER; note = 2'-O-methyluridine-3'-phosphorothioate
  modified_base 21: mod_base = OTHER; note = 2'-O-methyladenosine
  misc_feature 1..8: note = RNA
  misc_feature 10: note = RNA
  misc_feature 12..21: note = RNA
  misc_feature 9: note = DNA
  misc_feature 11: note = DNA
aggatgaagagaggcatgtta

SEQ ID NO: 1333 - RNA, 21 nt, synthetic construct
  source 1..21: mol_type = other RNA
  modified_base 1: mod_base = OTHER; note = 2'-O-methyluridine-3'-phosphorothioate
  modified_base 2: mod_base = OTHER; note = 2'-O-methyluridine-3'-phosphorothioate
  modified_base 3: mod_base = OTHER; note = 2'-O-methylguanosine-3'-phosphate
  modified_base 4: mod_base = OTHER; note = 2'-O-methylguanosine-3'-phosphate
  modified_base 5: mod_base = OTHER; note = 2'-O-methylguanosine-3'-phosphate
  modified_base 6: mod_base = OTHER; note = 2'-O-hexadecyl-cytidine-3'-phosphate
  modified_base 7: mod_base = OTHER; note = 2'-O-methyladenosine-3'-phosphate
  modified_base 8: mod_base = OTHER; note = 2'-O-methyladenosine-3'-phosphate
  modified_base 9: mod_base = OTHER; note = 2'-deoxy-2'-fluoroadenosine-3'-phosphate
  modified_base 10: mod_base = OTHER; note = 2'-deoxy-2'-fluoroguanosine-3'-phosphate
  modified_base 11: mod_base = OTHER; note = 2'-deoxy-2'-fluoroguanosine-3'-phosphate
  modified_base 12: mod_base = OTHER; note = 2'-O-methyluridine-3'-phosphate
  modified_base 13: mod_base = OTHER; note = 2'-O-methylguanosine-3'-phosphate
  modified_base 14: mod_base = OTHER; note = 2'-O-methylguanosine-3'-phosphate
  modified_base 15: mod_base = OTHER; note = 2'-O-methyladenosine-3'-phosphate
  modified_base 16: mod_base = OTHER; note = 2'-O-methyladenosine-3'-phosphate
  modified_base 17: mod_base = OTHER; note = 2'-O-methyladenosine-3'-phosphate
  modified_base 18: mod_base = OTHER; note = 2'-O-methyluridine-3'-phosphate
  modified_base 19: mod_base = OTHER; note = 2'-O-methylguanosine-3'-phosphorothioate
  modified_base 20: mod_base = OTHER; note = 2'-O-methyladenosine-3'-phosphorothioate
  modified_base 21: mod_base = OTHER; note = 2'-O-methyladenosine
ttgggcaaaggtggaaatgaa

SEQ ID NO: 1334 - DNA, 21 bp, synthetic construct
  source 1..21: mol_type = other DNA
  modified_base 1: mod_base = OTHER; note = 2'-O-methyluridine-3'-phosphorothioate
  modified_base 2: mod_base = OTHER; note = 2'-O-methyluridine-3'-phosphorothioate
  modified_base 3: mod_base = OTHER; note = 2'-O-methylguanosine-3'-phosphate
  modified_base 4: mod_base = OTHER; note = 2'-O-methylguanosine-3'-phosphate
  modified_base 5: mod_base = OTHER; note = 2'-O-methylguanosine-3'-phosphate
  modified_base 6: mod_base = OTHER; note = 2'-O-hexadecyl-cytidine-3'-phosphate
  modified_base 7: mod_base = OTHER; note = 2'-O-methyladenosine-3'-phosphate
  modified_base 8: mod_base = OTHER; note = 2'-O-methyladenosine-3'-phosphate
  modified_base 9: mod_base = OTHER; note = 2'-deoxy-2'-fluoroadenosine-3'-phosphate
  modified_base 10: mod_base = OTHER; note = 2'-O-methylguanosine-3'-phosphate
  modified_base 12: mod_base = OTHER; note = 2'-O-methyluridine-3'-phosphate
  modified_base 13: mod_base = OTHER; note = 2'-O-methylguanosine-3'-phosphate
  modified_base 14: mod_base = OTHER; note = 2'-O-methylguanosine-3'-phosphate
  modified_base 15: mod_base = OTHER; note = 2'-O-methyladenosine-3'-phosphate
  modified_base 16: mod_base = OTHER; note = 2'-O-methyladenosine-3'-phosphate
  modified_base 17: mod_base = OTHER; note = 2'-O-methyladenosine-3'-phosphate
  modified_base 18: mod_base = OTHER; note = 2'-O-methyluridine-3'-phosphate
  modified_base 19: mod_base = OTHER; note = 2'-O-methylguanosine-3'-phosphorothioate
  modified_base 20: mod_base = OTHER; note = 2'-O-methyladenosine-3'-phosphorothioate
  modified_base 21: mod_base = OTHER; note = 2'-O-methyladenosine
  misc_feature 1..10: note = RNA
  misc_feature 12..21: note = RNA
  misc_feature 11: note = DNA
ttgggcaaaggtggaaatgaa

SEQ ID NO: 1335 - DNA, 21 bp, synthetic construct
  source 1..21: mol_type = other DNA
  modified_base 1: mod_base = OTHER; note = 2'-O-methyluridine-3'-phosphorothioate
  modified_base 2: mod_base = OTHER; note = 2'-O-methyluridine-3'-phosphorothioate
  modified_base 3: mod_base = OTHER; note = 2'-O-methylguanosine-3'-phosphate
  modified_base 4: mod_base = OTHER; note = 2'-O-methylguanosine-3'-phosphate
  modified_base 5: mod_base = OTHER; note = 2'-O-methylguanosine-3'-phosphate
  modified_base 6: mod_base = OTHER; note = 2'-O-hexadecyl-cytidine-3'-phosphate
  modified_base 7: mod_base = OTHER; note = 2'-O-methyladenosine-3'-phosphate
  modified_base 8: mod_base = OTHER; note = 2'-O-methyladenosine-3'-phosphate
  modified_base 9: mod_base = OTHER; note = 2'-deoxy-2'-fluoroadenosine-3'-phosphate
  modified_base 10: mod_base = OTHER; note = 2'-O-methylguanosine-3'-phosphate
  modified_base 12: mod_base = OTHER; note = 2'-deoxy-2'-fluorouridine-3'-phosphate
  modified_base 13: mod_base = OTHER; note = 2'-O-methylguanosine-3'-phosphate
  modified_base 14: mod_base = OTHER; note = 2'-O-methylguanosine-3'-phosphate
  modified_base 15: mod_base = OTHER; note = 2'-O-methyladenosine-3'-phosphate
  modified_base 16: mod_base = OTHER; note = 2'-O-methyladenosine-3'-phosphate
  modified_base 17: mod_base = OTHER; note = 2'-O-methyladenosine-3'-phosphate
  modified_base 18: mod_base = OTHER; note = 2'-O-methyluridine-3'-phosphate
  modified_base 19: mod_base = OTHER; note = 2'-O-methylguanosine-3'-phosphorothioate
  modified_base 20: mod_base = OTHER; note = 2'-O-methyladenosine-3'-phosphorothioate
  modified_base 21: mod_base = OTHER; note = 2'-O-methyladenosine
  misc_feature 1..10: note = RNA
  misc_feature 12..21: note = RNA
  misc_feature 11: note = DNA
ttgggcaaaggtggaaatgaa

SEQ ID NO: 1336 - RNA, 21 nt, synthetic construct
  source 1..21: mol_type = other RNA
  modified_base 1: mod_base = OTHER; note = 2'-O-methylguanosine-3'-phosphorothioate
  modified_base 2: mod_base = OTHER; note = 2'-O-methylcytidine-3'-phosphorothioate
  modified_base 3: mod_base = OTHER; note = 2'-O-methyladenosine-3'-phosphate
  modified_base 4: mod_base = OTHER; note = 2'-O-methyladenosine-3'-phosphate
  modified_base 5: mod_base = OTHER; note = 2'-O-methyladenosine-3'-phosphate
  modified_base 6: mod_base = OTHER; note = 2'-O-methylguanosine-3'-phosphate
  modified_base 7: mod_base = OTHER; note = 2'-deoxy-2'-fluoroguanosine-3'-phosphate
  modified_base 8: mod_base = OTHER; note = 2'-O-methyluridine-3'-phosphate
  modified_base 9: mod_base = OTHER; note = 2'-deoxy-2'-fluoroguanosine-3'-phosphate
  modified_base 10: mod_base = OTHER; note = 2'-deoxy-2'-fluoroguanosine-3'-phosphate
  modified_base 11: mod_base = OTHER; note = 2'-deoxy-2'-fluoroadenosine-3'-phosphate
  modified_base 12: mod_base = OTHER; note = 2'-O-methyladenosine-3'-phosphate
  modified_base 13: mod_base = OTHER; note = 2'-O-methyladenosine-3'-phosphate
  modified_base 14: mod_base = OTHER; note = 2'-O-methyluridine-3'-phosphate
  modified_base 15: mod_base = OTHER; note = 2'-O-methylguanosine-3'-phosphate
  modified_base 16: mod_base = OTHER; note = 2'-O-hexadecyl-adenosine-3'-phosphate
  modified_base 17: mod_base = OTHER; note = 2'-O-methyladenosine-3'-phosphate
  modified_base 18: mod_base = OTHER; note = 2'-O-methylguanosine-3'-phosphate
  modified_base 19: mod_base = OTHER; note = 2'-O-methyladenosine-3'-phosphate
  modified_base 20: mod_base = OTHER; note = 2'-O-methyladenosine-3'-phosphate
  modified_base 21: mod_base = OTHER; note = 2'-O-methyladenosine-3'-phosphate ((2S,4R)-1-[29-[[2-(acetylamino)-2-deoxy-beta-D-galactopyra nosyl]oxy]-14,14-bis[[3-[[3-[[5-[[2-(acetylamino)-2-deoxy-b eta-D-galactopyranosyl]oxy]-1-oxopentyl]amino]propyl]amino] -3-oxopropoxy]methyl]-1,12,19,25-tetraoxo-16-oxa-13,20,24-t riazanonacos-1-yl]-4-hydroxy-2-pyrrolidinyl)methyl ester
gcaaaggtggaaatgaagaaa

SEQ ID NO: 1337 - RNA, 21 nt, synthetic construct
  source 1..21: mol_type = other RNA
  modified_base 1: mod_base = OTHER; note = 2'-O-methylguanosine-3'-phosphorothioate
  modified_base 2: mod_base = OTHER; note = 2'-O-methylcytidine-3'-phosphorothioate
  modified_base 3: mod_base = OTHER; note = 2'-O-methyladenosine-3'-phosphate
  modified_base 4: mod_base = OTHER; note = 2'-O-methyladenosine-3'-phosphate
  modified_base 5: mod_base = OTHER; note = 2'-O-methyladenosine-3'-phosphate
  modified_base 6: mod_base = OTHER; note = 2'-O-methylguanosine-3'-phosphate
  modified_base 7: mod_base = OTHER; note = 2'-O-methylguanosine-3'-phosphate
  modified_base 8: mod_base = OTHER; note = 2'-O-methyluridine-3'-phosphate
  modified_base 9: mod_base = OTHER; note = 2'-deoxy-2'-fluoroguanosine-3'-phosphate
  modified_base 10: mod_base = OTHER; note = 2'-deoxy-2'-fluoroguanosine-3'-phosphate
  modified_base 11: mod_base = OTHER; note = 2'-deoxy-2'-fluoroadenosine-3'-phosphate
  modified_base 12: mod_base = OTHER; note = 2'-O-methyladenosine-3'-phosphate
  modified_base 13: mod_base = OTHER; note = 2'-O-methyladenosine-3'-phosphate
  modified_base 14: mod_base = OTHER; note = 2'-O-methyluridine-3'-phosphate
  modified_base 15: mod_base = OTHER; note = 2'-O-methylguanosine-3'-phosphate
  modified_base 16: mod_base = OTHER; note = 2'-O-hexadecyl-adenosine-3'-phosphate
  modified_base 17: mod_base = OTHER; note = 2'-O-methyladenosine-3'-phosphate
  modified_base 18: mod_base = OTHER; note = 2'-O-methylguanosine-3'-phosphate
  modified_base 19: mod_base = OTHER; note = 2'-O-methyladenosine-3'-phosphorothioate
  modified_base 20: mod_base = OTHER; note = 2'-O-methyladenosine-3'-phosphorothioate
  modified_base 21: mod_base = OTHER; note = 2'-O-methyladenosine
gcaaaggtggaaatgaagaaa

SEQ ID NO: 1338 - DNA, 21 bp, synthetic construct
  source 1..21: mol_type = other DNA
  modified_base 1: mod_base = OTHER; note = 2'-O-methylguanosine-3'-phosphorothioate
  modified_base 2: mod_base = OTHER; note = 2'-O-methylcytidine-3'-phosphorothioate
  modified_base 3: mod_base = OTHER; note = 2'-O-methyladenosine-3'-phosphate
  modified_base 4: mod_base = OTHER; note = 2'-O-methyladenosine-3'-phosphate
  modified_base 5: mod_base = OTHER; note = 2'-O-methyladenosine-3'-phosphate
  modified_base 6: mod_base = OTHER; note = 2'-O-methylguanosine-3'-phosphate
  modified_base 7: mod_base = OTHER; note = 2'-O-methylguanosine-3'-phosphate
  modified_base 8: mod_base = OTHER; note = 2'-O-methyluridine-3'-phosphate
  modified_base 10: mod_base = OTHER; note = 2'-O-methylguanosine-3'-phosphate
  modified_base 11: mod_base = OTHER; note = 2'-deoxy-2'-fluoroadenosine-3'-phosphate
  modified_base 12: mod_base = OTHER; note = 2'-O-methyladenosine-3'-phosphate
  modified_base 13: mod_base = OTHER; note = 2'-O-methyladenosine-3'-phosphate
  modified_base 14: mod_base = OTHER; note = 2'-O-methyluridine-3'-phosphate
  modified_base 15: mod_base = OTHER; note = 2'-O-methylguanosine-3'-phosphate
  modified_base 16: mod_base = OTHER; note = 2'-O-hexadecyl-adenosine-3'-phosphate
  modified_base 17: mod_base = OTHER; note = 2'-O-methyladenosine-3'-phosphate
  modified_base 18: mod_base = OTHER; note = 2'-O-methylguanosine-3'-phosphate
  modified_base 19: mod_base = OTHER; note = 2'-O-methyladenosine-3'-phosphorothioate
  modified_base 20: mod_base = OTHER; note = 2'-O-methyladenosine-3'-phosphorothioate
  modified_base 21: mod_base = OTHER; note = 2'-O-methyladenosine
  misc_feature 1..8: note = RNA
  misc_feature 10..21: note = RNA
  misc_feature 9: note = DNA
gcaaaggtggaaatgaagaaa

SEQ ID NO: 1339 - RNA, 21 nt, synthetic construct
  source 1..21: mol_type = other RNA
  modified_base 1: mod_base = OTHER; note = 2'-O-methyladenosine-3'-phosphorothioate
  modified_base 2: mod_base = OTHER; note = 2'-O-methylguanosine-3'-phosphorothioate
  modified_base 3: mod_base = OTHER; note = 2'-O-methylguanosine-3'-phosphate
  modified_base 4: mod_base = OTHER; note = 2'-O-methyluridine-3'-phosphate
  modified_base 5: mod_base = OTHER; note = 2'-O-methylguanosine-3'-phosphate
  modified_base 6: mod_base = OTHER; note = 2'-O-methylguanosine-3'-phosphate
  modified_base 7: mod_base = OTHER; note = 2'-deoxy-2'-fluoroadenosine-3'-phosphate
  modified_base 8: mod_base = OTHER; note = 2'-O-methyladenosine-3'-phosphate
  modified_base 9: mod_base = OTHER; note = 2'-deoxy-2'-fluoroadenosine-3'-phosphate
  modified_base 10: mod_base = OTHER; note = 2'-deoxy-2'-fluorouridine-3'-phosphate
  modified_base 11: mod_base = OTHER; note = 2'-deoxy-2'-fluoroguanosine-3'-phosphate
  modified_base 12: mod_base = OTHER; note = 2'-O-methyladenosine-3'-phosphate
  modified_base 13: mod_base = OTHER; note = 2'-O-methyladenosine-3'-phosphate
  modified_base 14: mod_base = OTHER; note = 2'-O-methylguanosine-3'-phosphate
  modified_base 15: mod_base = OTHER; note = 2'-O-methyladenosine-3'-phosphate
  modified_base 16: mod_base = OTHER; note = 2'-O-hexadecyl-adenosine-3'-phosphate
  modified_base 17: mod_base = OTHER; note = 2'-O-methyladenosine-3'-phosphate
  modified_base 18: mod_base = OTHER; note = 2'-O-methylguanosine-3'-phosphate
  modified_base 19: mod_base = OTHER; note = 2'-O-methyluridine-3'-phosphate
  modified_base 20: mod_base = OTHER; note = 2'-O-methyladenosine-3'-phosphate
  modified_base 21: mod_base = OTHER; note = 2'-O-methyluridine-3'-phosphate ((2S,4R)-1-[29-[[2-(acetylamino)-2-deoxy-beta-D-galactopyra nosyl]oxy]-14,14-bis[[3-[[3-[[5-[[2-(acetylamino)-2-deoxy-b eta-D-galactopyranosyl]oxy]-1-oxopentyl]amino]propyl]amino] -3-oxopropoxy]methyl]-1,12,19,25-tetraoxo-16-oxa-13,20,24-t riazanonacos-1-yl]-4-hydroxy-2-pyrrolidinyl)methyl ester
aggtggaaatgaagaaagtat

SEQ ID NO: 1340 - RNA, 21 nt, synthetic construct
  source 1..21: mol_type = other RNA
  modified_base 1: mod_base = OTHER; note = 2'-O-methyladenosine-3'-phosphorothioate
  modified_base 2: mod_base = OTHER; note = 2'-O-methylguanosine-3'-phosphorothioate
  modified_base 3: mod_base = OTHER; note = 2'-O-methylguanosine-3'-phosphate
  modified_base 4: mod_base = OTHER; note = 2'-O-methyluridine-3'-phosphate
  modified_base 5: mod_base = OTHER; note = 2'-O-methylguanosine-3'-phosphate
  modified_base 6: mod_base = OTHER; note = 2'-O-methylguanosine-3'-phosphate
  modified_base 7: mod_base = OTHER; note = 2'-O-methyladenosine-3'-phosphate
  modified_base 8: mod_base = OTHER; note = 2'-O-methyladenosine-3'-phosphate
  modified_base 9: mod_base = OTHER; note = 2'-deoxy-2'-fluoroadenosine-3'-phosphate
  modified_base 10: mod_base = OTHER; note = 2'-deoxy-2'-fluorouridine-3'-phosphate
  modified_base 11: mod_base = OTHER; note = 2'-deoxy-2'-fluoroguanosine-3'-phosphate
  modified_base 12: mod_base = OTHER; note = 2'-O-methyladenosine-3'-phosphate
  modified_base 13: mod_base = OTHER; note = 2'-O-methyladenosine-3'-phosphate
  modified_base 14: mod_base = OTHER; note = 2'-O-methylguanosine-3'-phosphate
  modified_base 15: mod_base = OTHER; note = 2'-O-methyladenosine-3'-phosphate
  modified_base 16: mod_base = OTHER; note = 2'-O-hexadecyl-adenosine-3'-phosphate
  modified_base 17: mod_base = OTHER; note = 2'-O-methyladenosine-3'-phosphate
  modified_base 18: mod_base = OTHER; note = 2'-O-methylguanosine-3'-phosphate
  modified_base 19: mod_base = OTHER; note = 2'-O-methyluridine-3'-phosphorothioate
  modified_base 20: mod_base = OTHER; note = 2'-O-methyladenosine-3'-phosphorothioate
  modified_base 21: mod_base = OTHER; note = 2'-O-methyladenosine
aggtggaaatgaagaaagtaa

SEQ ID NO: 1341 - DNA, 21 bp, synthetic construct
  source 1..21: mol_type = other DNA
  modified_base 1: mod_base = OTHER; note = 2'-O-methyladenosine-3'-phosphorothioate
  modified_base 2: mod_base = OTHER; note = 2'-O-methylguanosine-3'-phosphorothioate
  modified_base 3: mod_base = OTHER; note = 2'-O-methylguanosine-3'-phosphate
  modified_base 4: mod_base = OTHER; note = 2'-O-methyluridine-3'-phosphate
  modified_base 5: mod_base = OTHER; note = 2'-O-methylguanosine-3'-phosphate
  modified_base 6: mod_base = OTHER; note = 2'-O-methylguanosine-3'-phosphate
  modified_base 7: mod_base = OTHER; note = 2'-O-methyladenosine-3'-phosphate
  modified_base 8: mod_base = OTHER; note = 2'-O-methyladenosine-3'-phosphate
  modified_base 9: mod_base = OTHER; note = 2'-deoxy-2'-fluoroadenosine-3'-phosphate
  modified_base 10: mod_base = OTHER; note = 2'-O-methyluridine-3'-phosphate
  modified_base 12: mod_base = OTHER; note = 2'-O-methyladenosine-3'-phosphate
  modified_base 13: mod_base = OTHER; note = 2'-O-methyladenosine-3'-phosphate
  modified_base 14: mod_base = OTHER; note = 2'-O-methylguanosine-3'-phosphate
  modified_base 15: mod_base = OTHER; note = 2'-O-methyladenosine-3'-phosphate
  modified_base 16: mod_base = OTHER; note = 2'-O-hexadecyl-adenosine-3'-phosphate
  modified_base 17: mod_base = OTHER; note = 2'-O-methyladenosine-3'-phosphate
  modified_base 18: mod_base = OTHER; note = 2'-O-methylguanosine-3'-phosphate
  modified_base 19: mod_base = OTHER; note = 2'-O-methyluridine-3'-phosphorothioate
  modified_base 20: mod_base = OTHER; note = 2'-O-methyladenosine-3'-phosphorothioate
  modified_base 21: mod_base = OTHER; note = 2'-O-methyladenosine
  misc_feature 1..10: note = RNA
  misc_feature 12..21: note = RNA
  misc_feature 11: note = DNA
aggtggaaatgaagaaagtaa

SEQ ID NO: 1342 - DNA, 21 bp, synthetic construct
  source 1..21: mol_type = other DNA
  modified_base 1: mod_base = OTHER; note = 2'-O-methyladenosine-3'-phosphorothioate
  modified_base 2: mod_base = OTHER; note = 2'-O-methylguanosine-3'-phosphorothioate
  modified_base 3: mod_base = OTHER; note = 2'-O-methylguanosine-3'-phosphate
  modified_base 4: mod_base = OTHER; note = 2'-O-methyluridine-3'-phosphate
  modified_base 5: mod_base = OTHER; note = 2'-O-methylguanosine-3'-phosphate
  modified_base 6: mod_base = OTHER; note = 2'-O-methylguanosine-3'-phosphate
  modified_base 7: mod_base = OTHER; note = 2'-O-methyladenosine-3'-phosphate
  modified_base 8: mod_base = OTHER; note = 2'-O-methyladenosine-3'-phosphate
  modified_base 9: mod_base = OTHER; note = 2'-deoxy-2'-fluoroadenosine-3'-phosphate
  modified_base 10: mod_base = OTHER; note = 2'-O-methyluridine-3'-phosphate
  modified_base 12: mod_base = OTHER; note = 2'-deoxy-2'-fluoroadenosine-3'-phosphate
  modified_base 13: mod_base = OTHER; note = 2'-O-methyladenosine-3'-phosphate
  modified_base 14: mod_base = OTHER; note = 2'-O-methylguanosine-3'-phosphate
  modified_base 15: mod_base = OTHER; note = 2'-O-methyladenosine-3'-phosphate
  modified_base 16: mod_base = OTHER; note = 2'-O-hexadecyl-adenosine-3'-phosphate
  modified_base 17: mod_base = OTHER; note = 2'-O-methyladenosine-3'-phosphate
  modified_base 18: mod_base = OTHER; note = 2'-O-methylguanosine-3'-phosphate
  modified_base 19: mod_base = OTHER; note = 2'-O-methyluridine-3'-phosphorothioate
  modified_base 20: mod_base = OTHER; note = 2'-O-methyladenosine-3'-phosphorothioate
  modified_base 21: mod_base = OTHER; note = 2'-O-methyladenosine
  misc_feature 1..10: note = RNA
  misc_feature 12..21: note = RNA
  misc_feature 11: note = DNA
aggtggaaatgaagaaagtaa

SEQ ID NO: 1343 - DNA, 23 bp, synthetic construct
  source 1..23: mol_type = other DNA
  modified_base 1: mod_base = OTHER; note = 2'-O-methyluridine-3'-phosphorothioate 5'-(E)-Vinylphosphonate
  modified_base 2: mod_base = OTHER; note = 2'-deoxythymidine-3'-phosphorothioate
  modified_base 3: mod_base = OTHER; note = 2'-O-methylcytidine-3'-phosphate
  modified_base 4: mod_base = OTHER; note = 2'-O-methylcytidine-3'-phosphate
  modified_base 6: mod_base = OTHER; note = 2'-O-methyluridine-3'-phosphate
  modified_base 7: mod_base = OTHER; note = cytidine-2'-phosphate
  modified_base 8: mod_base = OTHER; note = 2'-O-methyluridine-3'-phosphate
  modified_base 9: mod_base = OTHER; note = 2'-O-methylguanosine-3'-phosphate
  modified_base 10: mod_base = OTHER; note = 2'-O-methylcytidine-3'-phosphate
  modified_base 11: mod_base = OTHER; note = 2'-O-methyluridine-3'-phosphate
  modified_base 13: mod_base = OTHER; note = 2'-O-methylguanosine-3'-phosphate
  modified_base 14: mod_base = OTHER; note = 2'-deoxy-2'-fluoroadenosine-3'-phosphate
  modified_base 15: mod_base = OTHER; note = 2'-O-methyladenosine-3'-phosphate
  modified_base 16: mod_base = OTHER; note = 2'-O-methyladenosine-3'-phosphate
  modified_base 17: mod_base = OTHER; note = 2'-O-methyluridine-3'-phosphate
  modified_base 18: mod_base = OTHER; note = 2'-O-methyluridine-3'-phosphate
  modified_base 19: mod_base = OTHER; note = 2'-O-methylguanosine-3'-phosphate
  modified_base 20: mod_base = OTHER; note = 2'-O-methyladenosine-3'-phosphate
  modified_base 21: mod_base = OTHER; note = 2'-O-methyluridine-3'-phosphorothioate
  modified_base 22: mod_base = OTHER; note = 2'-O-methylguanosine-3'-phosphorothioate
  modified_base 23: mod_base = OTHER; note = 2'-O-methylguanosine
  misc_feature 1: note = RNA
  misc_feature 3..4: note = RNA
  misc_feature 6..11: note = RNA
  misc_feature 13..23: note = RNA
  misc_feature 2: note = DNA
  misc_feature 5: note = DNA
  misc_feature 12: note = DNA
ttccttctgctcgaaattgatgg

SEQ ID NO: 1344 - DNA, 23 bp, synthetic construct
  source 1..23: mol_type = other DNA
  modified_base 1: mod_base = OTHER; note = 2'-O-methyluridine-3'-phosphorothioate 5'-(E)-Vinylphosphonate
  modified_base 2: mod_base = OTHER; note = 2'-deoxycytidine-3'-phosphorothioate
  modified_base 3: mod_base = OTHER; note = 2'-O-methyluridine-3'-phosphate
  modified_base 4: mod_base = OTHER; note = 2'-O-methyluridine-3'-phosphate
  modified_base 6: mod_base = OTHER; note = 2'-O-methylcytidine-3'-phosphate
  modified_base 7: mod_base = OTHER; note = cytidine-2'-phosphate
  modified_base 8: mod_base = OTHER; note = 2'-O-methyluridine-3'-phosphate
  modified_base 9: mod_base = OTHER; note = 2'-O-methyluridine-3'-phosphate
  modified_base 10: mod_base = OTHER; note = 2'-O-methylcytidine-3'-phosphate
  modified_base 11: mod_base = OTHER; note = 2'-O-methyluridine-3'-phosphate
  modified_base 13: mod_base = OTHER; note = 2'-O-methylcytidine-3'-phosphate
  modified_base 14: mod_base = OTHER; note = 2'-deoxy-2'-fluorouridine-3'-phosphate
  modified_base 15: mod_base = OTHER; note = 2'-O-methylcytidine-3'-phosphate
  modified_base 16: mod_base = OTHER; note = 2'-O-methylguanosine-3'-phosphate
  modified_base 17: mod_base = OTHER; note = 2'-O-methyladenosine-3'-phosphate
  modified_base 18: mod_base = OTHER; note = 2'-O-methyladenosine-3'-phosphate
  modified_base 19: mod_base = OTHER; note = 2'-O-methyladenosine-3'-phosphate
  modified_base 20: mod_base = OTHER; note = 2'-O-methyluridine-3'-phosphate
  modified_base 21: mod_base = OTHER; note = 2'-O-methyluridine-3'-phosphorothioate
  modified_base 22: mod_base = OTHER; note = 2'-O-methylguanosine-3'-phosphorothioate
  modified_base 23: mod_base = OTHER; note = 2'-O-methylguanosine
  misc_feature 1: note = RNA
  misc_feature 3..4: note = RNA
  misc_feature 6..11: note = RNA
  misc_feature 13..23: note = RNA
  misc_feature 2: note = DNA
  misc_feature 5: note = DNA
  misc_feature 12: note = DNA
tctttccttctgctcgaaattgg

SEQ ID NO: 1345 - DNA, 23 bp, synthetic construct
  source 1..23: mol_type = other DNA
  modified_base 1: mod_base = OTHER; note = 2'-O-methyluridine-3'-phosphorothioate 5'-(E)-Vinylphosphonate
  modified_base 2: mod_base = OTHER; note = 2'-deoxythymidine-3'-phosphorothioate
  modified_base 3: mod_base = OTHER; note = 2'-O-methyluridine-3'-phosphate
  modified_base 4: mod_base = OTHER; note = 2'-O-methyladenosine-3'-phosphate
  modified_base 6: mod_base = OTHER; note = 2'-O-methyluridine-3'-phosphate
  modified_base 7: mod_base = OTHER; note = Thymidine-glycol nucleic acid (GNA), S-Isomer
  modified_base 8: mod_base = OTHER; note = 2'-O-methyluridine-3'-phosphate
  modified_base 9: mod_base = OTHER; note = 2'-O-methylcytidine-3'-phosphate
  modified_base 10: mod_base = OTHER; note = 2'-O-methylcytidine-3'-phosphate
  modified_base 11: mod_base = OTHER; note = 2'-O-methyluridine-3'-phosphate
  modified_base 13: mod_base = OTHER; note = 2'-O-methylcytidine-3'-phosphate
  modified_base 14: mod_base = OTHER; note = 2'-deoxy-2'-fluorouridine-3'-phosphate
  modified_base 15: mod_base = OTHER; note = 2'-O-methylguanosine-3'-phosphate
  modified_base 16: mod_base = OTHER; note = 2'-O-methylcytidine-3'-phosphate
  modified_base 17: mod_base = OTHER; note = 2'-O-methyluridine-3'-phosphate
  modified_base 18: mod_base = OTHER; note = 2'-O-methylcytidine-3'-phosphate
  modified_base 19: mod_base = OTHER; note = 2'-O-methylguanosine-3'-phosphate
  modified_base 20: mod_base = OTHER; note = 2'-O-methyladenosine-3'-phosphate
  modified_base 21: mod_base = OTHER; note = 2'-O-methyladenosine-3'-phosphorothioate
  modified_base 22: mod_base = OTHER; note = 2'-O-methyladenosine-3'-phosphorothioate
  modified_base 23: mod_base = OTHER; note = 2'-O-methyluridine
  misc_feature 1: note = RNA
  misc_feature 3..4: note = RNA
  misc_feature 6..11: note = RNA
  misc_feature 13..23: note = RNA
  misc_feature 2: note = DNA
  misc_feature 5: note = DNA
  misc_feature 12: note = DNA
tttactttccttctgctcgaaat

SEQ ID NO: 1346 - DNA, 23 bp, synthetic construct
  source 1..23: mol_type = other DNA
  modified_base 1: mod_base = OTHER; note = 2'-O-methyluridine-3'-phosphorothioate 5'-(E)-Vinylphosphonate
  modified_base 2: mod_base = OTHER; note = 2'-deoxy-2'-fluoroadenosine-3'-phosphorothioate
  modified_base 3: mod_base = OTHER; note = 2'-O-methylcytidine-3'-phosphate
  modified_base 4: mod_base = OTHER; note = 2'-O-methyluridine-3'-phosphate
  modified_base 6: mod_base = OTHER; note = 2'-O-methylguanosine-3'-phosphate
  modified_base 7: mod_base = OTHER; note = Thymidine-glycol nucleic acid (GNA), S-Isomer
  modified_base 8: mod_base = OTHER; note = 2'-O-methylcytidine-3'-phosphate
  modified_base 9: mod_base = OTHER; note = 2'-O-methylcytidine-3'-phosphate
  modified_base 10: mod_base = OTHER; note = 2'-O-methyladenosine-3'-phosphate
  modified_base 11: mod_base = OTHER; note = 2'-O-methyluridine-3'-phosphate
  modified_base 12: mod_base = OTHER; note = 2'-O-methyluridine-3'-phosphate
  modified_base 13: mod_base = OTHER; note = 2'-O-methyladenosine-3'-phosphate
  modified_base 14: mod_base = OTHER; note = 2'-deoxy-2'-fluorocytidine-3'-phosphate
  modified_base 15: mod_base = OTHER; note = 2'-O-methyluridine-3'-phosphate
  modified_base 16: mod_base = OTHER; note = 2'-deoxy-2'-fluorouridine-3'-phosphate
  modified_base 17: mod_base = OTHER; note = 2'-O-methyluridine-3'-phosphate
  modified_base 18: mod_base = OTHER; note = 2'-O-methylcytidine-3'-phosphate
  modified_base 19: mod_base = OTHER; note = 2'-O-methylcytidine-3'-phosphate
  modified_base 20: mod_base = OTHER; note = 2'-O-methyluridine-3'-phosphate
  modified_base 21: mod_base = OTHER; note = 2'-O-methyluridine-3'-phosphorothioate
  modified_base 22: mod_base = OTHER; note = 2'-O-methylcytidine-3'-phosphorothioate
  modified_base 23: mod_base = OTHER; note = 2'-O-methyluridine
  misc_feature 1..4: note = RNA
  misc_feature 6..23: note = RNA
  misc_feature 5: note = DNA
tactggtccattactttccttct

SEQ ID NO: 1347 - DNA, 23 bp, synthetic construct
  source 1..23: mol_type = other DNA
  modified_base 1: mod_base = OTHER; note = 2'-O-methyluridine-3'-phosphorothioate 5'-(E)-Vinylphosphonate
  modified_base 2: mod_base = OTHER; note = 2'-deoxyadenosine-3'-phosphorothioate
  modified_base 3: mod_base = OTHER; note = 2'-O-methylcytidine-3'-phosphate
  modified_base 4: mod_base = OTHER; note = 2'-O-methyluridine-3'-phosphate
  modified_base 6: mod_base = OTHER; note = 2'-O-methylguanosine-3'-phosphate
  modified_base 7: mod_base = OTHER; note = Thymidine-glycol nucleic acid (GNA), S-Isomer
  modified_base 8: mod_base = OTHER; note = 2'-O-methylcytidine-3'-phosphate
  modified_base 9: mod_base = OTHER; note = 2'-O-methylcytidine-3'-phosphate
  modified_base 10: mod_base = OTHER; note = 2'-O-methyladenosine-3'-phosphate
  modified_base 11: mod_base = OTHER; note = 2'-O-methyluridine-3'-phosphate
  modified_base 13: mod_base = OTHER; note = 2'-O-methyladenosine-3'-phosphate
  modified_base 15: mod_base = OTHER; note = 2'-O-methyluridine-3'-phosphate
  modified_base 17: mod_base = OTHER; note = 2'-O-methyluridine-3'-phosphate
  modified_base 18: mod_base = OTHER; note = 2'-O-methylcytidine-3'-phosphate
  modified_base 19: mod_base = OTHER; note = 2'-O-methylcytidine-3'-phosphate
  modified_base 20: mod_base = OTHER; note = 2'-O-methyluridine-3'-phosphate
  modified_base 21: mod_base = OTHER; note = 2'-O-methyluridine-3'-phosphorothioate
  modified_base 22: mod_base = OTHER; note = 2'-O-methylcytidine-3'-phosphorothioate
  modified_base 23: mod_base = OTHER; note = 2'-O-methyluridine
  misc_feature 1: note = RNA
  misc_feature 3..4: note = RNA
  misc_feature 6..11: note = RNA
  misc_feature 13: note = RNA
  misc_feature 15: note = RNA
  misc_feature 17..23: note = RNA
  misc_feature 2: note = DNA
  misc_feature 5: note = DNA
  misc_feature 12: note = DNA
  misc_feature 14: note = DNA
  misc_feature 16: note = DNA
tactggtccattactttccttct

SEQ ID NO: 1348 - DNA, 23 bp, synthetic construct
  source 1..23: mol_type = other DNA
  modified_base 1: mod_base = OTHER; note = 2'-O-methyluridine-3'-phosphorothioate 5'-(E)-Vinylphosphonate
  modified_base 2: mod_base = OTHER; note = 2'-deoxy-2'-fluorocytidine-3'-phosphorothioate
  modified_base 3: mod_base = OTHER; note = 2'-O-methyladenosine-3'-phosphate
  modified_base 4: mod_base = OTHER; note = 2'-O-methylcytidine-3'-phosphate
  modified_base 6: mod_base = OTHER; note = 2'-O-methylguanosine-3'-phosphate
  modified_base 7: mod_base = OTHER; note = guanosine-2'-phosphate
  modified_base 8: mod_base = OTHER; note = 2'-O-methyluridine-3'-phosphate
  modified_base 9: mod_base = OTHER; note = 2'-O-methylcytidine-3'-phosphate
  modified_base 10: mod_base = OTHER; note = 2'-O-methylcytidine-3'-phosphate
  modified_base 11: mod_base = OTHER; note = 2'-O-methyladenosine-3'-phosphate
  modified_base 12: mod_base = OTHER; note = 2'-O-methyluridine-3'-phosphate
  modified_base 13: mod_base = OTHER; note = 2'-O-methyluridine-3'-phosphate
  modified_base 14: mod_base = OTHER; note = 2'-deoxy-2'-fluoroadenosine-3'-phosphate
  modified_base 15: mod_base = OTHER; note = 2'-O-methylcytidine-3'-phosphate
  modified_base 16: mod_base = OTHER; note = 2'-deoxy-2'-fluorouridine-3'-phosphate
  modified_base 17: mod_base = OTHER; note = 2'-O-methyluridine-3'-phosphate
  modified_base 18: mod_base = OTHER; note = 2'-O-methyluridine-3'-phosphate
  modified_base 19: mod_base = OTHER; note = 2'-O-methylcytidine-3'-phosphate
  modified_base 20: mod_base = OTHER; note = 2'-O-methylcytidine-3'-phosphate
  modified_base 21: mod_base = OTHER; note = 2'-O-methyluridine-3'-phosphorothioate
  modified_base 22: mod_base = OTHER; note = 2'-O-methyluridine-3'-phosphorothioate
  modified_base 23: mod_base = OTHER; note = 2'-O-methylcytidine
  misc_feature 1..4: note = RNA
  misc_feature 6..23: note = RNA
  misc_feature 5: note = DNA
tcactggtccattactttccttc

SEQ ID NO: 1349 - DNA, 23 bp, synthetic construct
  source 1..23: mol_type = other DNA
  modified_base 1: mod_base = OTHER; note = 2'-O-methyluridine-3'-phosphorothioate 5'-(E)-Vinylphosphonate
  modified_base 2: mod_base = OTHER; note = 2'-deoxycytidine-3'-phosphorothioate
  modified_base 3: mod_base = OTHER; note = 2'-O-methyladenosine-3'-phosphate
  modified_base 4: mod_base = OTHER; note = 2'-O-methylcytidine-3'-phosphate
  modified_base 6: mod_base = OTHER; note = 2'-O-methylguanosine-3'-phosphate
  modified_base 7: mod_base = OTHER; note = guanosine-2'-phosphate
  modified_base 8: mod_base = OTHER; note = 2'-O-methyluridine-3'-phosphate
  modified_base 9: mod_base = OTHER; note = 2'-O-methylcytidine-3'-phosphate
  modified_base 10: mod_base = OTHER; note = 2'-O-methylcytidine-3'-phosphate
  modified_base 11: mod_base = OTHER; note = 2'-O-methyladenosine-3'-phosphate
  modified_base 13: mod_base = OTHER; note = 2'-O-methyluridine-3'-phosphate
  modified_base 14: mod_base = OTHER; note = 2'-deoxy-2'-fluoroadenosine-3'-phosphate
  modified_base 15: mod_base = OTHER; note = 2'-O-methylcytidine-3'-phosphate
  modified_base 16: mod_base = OTHER; note = 2'-O-methyluridine-3'-phosphate
  modified_base 17: mod_base = OTHER; note = 2'-O-methyluridine-3'-phosphate
  modified_base 18: mod_base = OTHER; note = 2'-O-methyluridine-3'-phosphate
  modified_base 19: mod_base = OTHER; note = 2'-O-methylcytidine-3'-phosphate
  modified_base 20: mod_base = OTHER; note = 2'-O-methylcytidine-3'-phosphate
  modified_base 21: mod_base = OTHER; note = 2'-O-methyluridine-3'-phosphorothioate
  modified_base 22: mod_base = OTHER; note = 2'-O-methyluridine-3'-phosphorothioate
  modified_base 23: mod_base = OTHER; note = 2'-O-methylcytidine
  misc_feature 1: note = RNA
  misc_feature 3..4: note = RNA
  misc_feature 6..11: note = RNA
  misc_feature 13..23: note = RNA
  misc_feature 2: note = DNA
  misc_feature 5: note = DNA
  misc_feature 12: note = DNA
tcactggtccattactttccttc

SEQ ID NO: 1350 - DNA, 23 bp, synthetic construct
  source 1..23: mol_type = other DNA
  modified_base 1: mod_base = OTHER; note = 2'-O-methyluridine-3'-phosphorothioate 5'-(E)-Vinylphosphonate
  modified_base 2: mod_base = OTHER; note = 2'-deoxycytidine-3'-phosphorothioate
  modified_base 3: mod_base = OTHER; note = 2'-O-methyladenosine-3'-phosphate
  modified_base 4: mod_base = OTHER; note = 2'-O-methylcytidine-3'-phosphate
  modified_base 6: mod_base = OTHER; note = 2'-O-methylguanosine-3'-phosphate
  modified_base 7: mod_base = OTHER; note = guanosine-2'-phosphate
  modified_base 8: mod_base = OTHER; note = 2'-O-methyluridine-3'-phosphate
  modified_base 9: mod_base = OTHER; note = 2'-O-methylcytidine-3'-phosphate
  modified_base 10: mod_base = OTHER; note = 2'-O-methylcytidine-3'-phosphate
  modified_base 11: mod_base = OTHER; note = 2'-O-methyladenosine-3'-phosphate
  modified_base 13: mod_base = OTHER; note = 2'-O-methyluridine-3'-phosphate
  modified_base 15: mod_base = OTHER; note = 2'-O-methylcytidine-3'-phosphate
  modified_base 17: mod_base = OTHER; note = 2'-O-methyluridine-3'-phosphate
  modified_base 18: mod_base = OTHER; note = 2'-O-methyluridine-3'-phosphate
  modified_base 19: mod_base = OTHER; note = 2'-O-methylcytidine-3'-phosphate
  modified_base 20: mod_base = OTHER; note = 2'-O-methylcytidine-3'-phosphate
  modified_base 21: mod_base = OTHER; note = 2'-O-methyluridine-3'-phosphorothioate
  modified_base 22: mod_base = OTHER; note = 2'-O-methyluridine-3'-phosphorothioate
  modified_base 23: mod_base = OTHER; note = 2'-O-methylcytidine
  misc_feature 1: note = RNA
  misc_feature 3..4: note = RNA
  misc_feature 6..11: note = RNA
  misc_feature 13: note = RNA
  misc_feature 15: note = RNA
  misc_feature 17..23: note = RNA
  misc_feature 2: note = DNA
  misc_feature 5: note = DNA
  misc_feature 12: note = DNA
  misc_feature 14: note = DNA
  misc_feature 16: note = DNA
tcactggtccattactttccttc

SEQ ID NO: 1351 - DNA, 23 bp, synthetic construct
  source 1..23: mol_type = other DNA
  modified_base 1: mod_base = OTHER; note = 2'-O-methyluridine-3'-phosphorothioate 5'-(E)-Vinylphosphonate
  modified_base 2: mod_base = OTHER; note = 2'-deoxythymidine-3'-phosphorothioate
  modified_base 3: mod_base = OTHER; note = 2'-O-methyluridine-3'-phosphate
  modified_base 4: mod_base = OTHER; note = 2'-O-methylcytidine-3'-phosphate
  modified_base 6: mod_base = OTHER; note = 2'-O-methylcytidine-3'-phosphate
  modified_base 7: mod_base = OTHER; note = Thymidine-glycol nucleic acid (GNA), S-Isomer
  modified_base 8: mod_base = OTHER; note = 2'-O-methylguanosine-3'-phosphate
  modified_base 9: mod_base = OTHER; note = 2'-O-methylguanosine-3'-phosphate
  modified_base 10: mod_base = OTHER; note = 2'-O-methyluridine-3'-phosphate
  modified_base 11: mod_base = OTHER; note = 2'-O-methylcytidine-3'-phosphate
  modified_base 13: mod_base = OTHER; note = 2'-O-methyladenosine-3'-phosphate
  modified_base 14: mod_base = OTHER; note = 2'-deoxy-2'-fluorouridine-3'-phosphate
  modified_base 15: mod_base = OTHER; note = 2'-O-methyluridine-3'-phosphate
  modified_base 16: mod_base = OTHER; note = 2'-O-methyladenosine-3'-phosphate
  modified_base 17: mod_base = OTHER; note = 2'-O-methylcytidine-3'-phosphate
  modified_base 18: mod_base = OTHER; note = 2'-O-methyluridine-3'-phosphate
  modified_base 19: mod_base = OTHER; note = 2'-O-methyluridine-3'-phosphate
  modified_base 20: mod_base = OTHER; note = 2'-O-methyluridine-3'-phosphate
  modified_base 21: mod_base = OTHER; note = 2'-O-methylcytidine-3'-phosphorothioate
  modified_base 22: mod_base = OTHER; note = 2'-O-methylcytidine-3'-phosphorothioate
  modified_base 23: mod_base = OTHER; note = 2'-O-methyluridine
  misc_feature 1: note = RNA
  misc_feature 3..4: note = RNA
  misc_feature 6..11: note = RNA
  misc_feature 13..23: note = RNA
  misc_feature 2: note = DNA
  misc_feature 5: note = DNA
  misc_feature 12: note = DNA
tttcactggtccattactttcct

SEQ ID NO: 1352 - DNA, 23 bp, synthetic construct
  source 1..23: mol_type = other DNA
  modified_base 1: mod_base = OTHER; note = 2'-O-methyluridine-3'-phosphorothioate 5'-(E)-Vinylphosphonate
  modified_base 2: mod_base = OTHER; note = 2'-deoxy-2'-fluoroadenosine-3'-phosphorothioate
  modified_base 3: mod_base = OTHER; note = 2'-O-methyladenosine-3'-phosphate
  modified_base 4: mod_base = OTHER; note = 2'-O-methyladenosine-3'-phosphate
  modified_base 6: mod_base = OTHER; note = 2'-O-methyluridine-3'-phosphate
  modified_base 7: mod_base = OTHER; note = guanosine-2'-phosphate
  modified_base 8: mod_base = OTHER; note = 2'-O-methyladenosine-3'-phosphate
  modified_base 9: mod_base = OTHER; note = 2'-O-methylguanosine-3'-phosphate
  modified_base 10: mod_base = OTHER; note = 2'-O-methylguanosine-3'-phosphate
  modified_base 11: mod_base = OTHER; note = 2'-O-methyladenosine-3'-phosphate
  modified_base 12: mod_base = OTHER; note = 2'-O-methylcytidine-3'-phosphate
  modified_base 13: mod_base = OTHER; note = 2'-O-methylcytidine-3'-phosphate
  modified_base 14: mod_base = OTHER; note = 2'-deoxy-2'-fluorouridine-3'-phosphate
  modified_base 15: mod_base = OTHER; note = 2'-O-methylguanosine-3'-phosphate
  modified_base 16: mod_base = OTHER; note = 2'-deoxy-2'-fluorocytidine-3'-phosphate
  modified_base 17: mod_base = OTHER; note = 2'-O-methyladenosine-3'-phosphate
  modified_base 18: mod_base = OTHER; note = 2'-O-methylcytidine-3'-phosphate
  modified_base 19: mod_base = OTHER; note = 2'-O-methyluridine-3'-phosphate
  modified_base 20: mod_base = OTHER; note = 2'-O-methylguanosine-3'-phosphate
  modified_base 21: mod_base = OTHER; note = 2'-O-methylguanosine-3'-phosphorothioate
  modified_base 22: mod_base = OTHER; note = 2'-O-methyluridine-3'-phosphorothioate
  modified_base 23: mod_base = OTHER; note = 2'-O-methylguanosine
  misc_feature 1..4: note = RNA
  misc_feature 6..23: note = RNA
  misc_feature 5: note = DNA
taaagtgaggacctgcactggtg

SEQ ID NO: 1353 - DNA, 23 bp, synthetic construct
  source 1..23: mol_type = other DNA
  modified_base 1: mod_base = OTHER; note = 2'-O-methyluridine-3'-phosphorothioate 5'-(E)-Vinylphosphonate
  modified_base 2: mod_base = OTHER; note = 2'-deoxyadenosine-3'-phosphorothioate
  modified_base 3: mod_base = OTHER; note = 2'-O-methyladenosine-3'-phosphate
  modified_base 4: mod_base = OTHER; note = 2'-O-methyladenosine-3'-phosphate
  modified_base 6: mod_base = OTHER; note = 2'-O-methyluridine-3'-phosphate
  modified_base 7: mod_base = OTHER; note = guanosine-2'-phosphate
  modified_base 8: mod_base = OTHER; note = 2'-O-methyladenosine-3'-phosphate
  modified_base 9: mod_base = OTHER; note = 2'-O-methylguanosine-3'-phosphate
  modified_base 10: mod_base = OTHER; note = 2'-O-methylguanosine-3'-phosphate
  modified_base 11: mod_base = OTHER; note = 2'-O-methyladenosine-3'-phosphate
  modified_base 13: mod_base = OTHER; note = 2'-O-methylcytidine-3'-phosphate
  modified_base 14: mod_base = OTHER; note = 2'-deoxy-2'-fluorouridine-3'-phosphate
  modified_base 15: mod_base = OTHER; note = 2'-O-methylguanosine-3'-phosphate
  modified_base 16: mod_base = OTHER; note = 2'-O-methylcytidine-3'-phosphate
  modified_base 17: mod_base = OTHER; note = 2'-O-methyladenosine-3'-phosphate
  modified_base 18: mod_base = OTHER; note = 2'-O-methylcytidine-3'-phosphate
  modified_base 19: mod_base = OTHER; note = 2'-O-methyluridine-3'-phosphate
  modified_base 20: mod_base = OTHER; note = 2'-O-methylguanosine-3'-phosphate
  modified_base 21: mod_base = OTHER; note = 2'-O-methylguanosine-3'-phosphorothioate
  modified_base 22: mod_base = OTHER; note = 2'-O-methyluridine-3'-phosphorothioate
  modified_base 23: mod_base = OTHER; note = 2'-O-methylguanosine
  misc_feature 1: note = RNA
  misc_feature 3..4: note = RNA
  misc_feature 6..11: note = RNA
  misc_feature 13..23: note = RNA
  misc_feature 2: note = DNA
  misc_feature 5: note = DNA
  misc_feature 12: note = DNA
taaagtgaggacctgcactggtg

SEQ ID NO: 1354 - DNA, 23 bp, synthetic construct
  source 1..23: mol_type = other DNA
  modified_base 1: mod_base = OTHER; note = 2'-O-methyluridine-3'-phosphorothioate 5'-(E)-Vinylphosphonate
  modified_base 2: mod_base = OTHER; note = 2'-deoxyadenosine-3'-phosphorothioate
  modified_base 3: mod_base = OTHER; note = 2'-O-methylguanosine-3'-phosphate
  modified_base 4: mod_base = OTHER; note = 2'-O-methylguanosine-3'-phosphate
  modified_base 6: mod_base = OTHER; note = 2'-O-methyluridine-3'-phosphate
  modified_base 8: mod_base = OTHER; note = 2'-O-methyladenosine-3'-phosphate
  modified_base 9: mod_base = OTHER; note = 2'-O-methyladenosine-3'-phosphate
  modified_base 10: mod_base = OTHER; note = 2'-O-methyladenosine-3'-phosphate
  modified_base 11: mod_base = OTHER; note = 2'-O-methylguanosine-3'-phosphate
  modified_base 13: mod_base = OTHER; note = 2'-O-methylguanosine-3'-phosphate
  modified_base 15: mod_base = OTHER; note = 2'-O-methylguanosine-3'-phosphate
  modified_base 17: mod_base = OTHER; note = 2'-O-methyladenosine-3'-phosphate
  modified_base 18: mod_base = OTHER; note = 2'-O-methylcytidine-3'-phosphate
  modified_base 19: mod_base = OTHER; note = 2'-O-methylcytidine-3'-phosphate
  modified_base 20: mod_base = OTHER; note = 2'-O-methyluridine-3'-phosphate
  modified_base 21: mod_base = OTHER; note = 2'-O-methylguanosine-3'-phosphorothioate
  modified_base 22: mod_base = OTHER; note = 2'-O-methylcytidine-3'-phosphorothioate
  modified_base 23: mod_base = OTHER; note = 2'-O-methylguanosine
  misc_feature 1: note = RNA
  misc_feature 3..4: note = RNA
  misc_feature 6: note = RNA
  misc_feature 8..11: note = RNA
  misc_feature 13: note = RNA
  misc_feature 15: note = RNA
  misc_feature 17..23: note = RNA
  misc_feature 2: note = DNA
  misc_feature 5: note = DNA
  misc_feature 7: note = DNA
  misc_feature 12: note = DNA
  misc_feature 14: note = DNA
  misc_feature 16: note = DNA
taggattaaagtgaggacctgcg

SEQ ID NO: 1355 - DNA, 23 bp, synthetic construct
  source 1..23: mol_type = other DNA
  modified_base 1: mod_base = OTHER; note = 2'-O-methyluridine-3'-phosphorothioate 5'-(E)-Vinylphosphonate
  modified_base 2: mod_base = OTHER; note = 2'-deoxy-2'-fluoroguanosine-3'-phosphorothioate
  modified_base 3: mod_base = OTHER; note = 2'-O-methyladenosine-3'-phosphate
  modified_base 4: mod_base = OTHER; note = 2'-O-methyluridine-3'-phosphate
  modified_base 6: mod_base = OTHER; note = 2'-O-methylguanosine-3'-phosphate
  modified_base 7: mod_base = OTHER; note = Adenosine-glycol nucleic acid (GNA), S-isomer
  modified_base 8: mod_base = OTHER; note = 2'-O-methylguanosine-3'-phosphate
  modified_base 9: mod_base = OTHER; note = 2'-O-methylguanosine-3'-phosphate
  modified_base 10: mod_base = OTHER; note = 2'-O-methyladenosine-3'-phosphate
  modified_base 11: mod_base = OTHER; note = 2'-O-methyluridine-3'-phosphate
  modified_base 12: mod_base = OTHER; note = 2'-O-methyluridine-3'-phosphate
  modified_base 13: mod_base = OTHER; note = 2'-O-methyladenosine-3'-phosphate
  modified_base 14: mod_base = OTHER; note = 2'-deoxy-2'-fluoroadenosine-3'-phosphate
  modified_base 15: mod_base = OTHER; note = 2'-O-methyladenosine-3'-phosphate
  modified_base 16: mod_base = OTHER; note = 2'-deoxy-2'-fluoroguanosine-3'-phosphate
  modified_base 17: mod_base = OTHER; note = 2'-O-methyluridine-3'-phosphate
  modified_base 18: mod_base = OTHER; note = 2'-O-methylguanosine-3'-phosphate
  modified_base 19: mod_base = OTHER; note = 2'-O-methyladenosine-3'-phosphate
  modified_base 20: mod_base = OTHER; note = 2'-O-methylguanosine-3'-phosphate
  modified_base 21: mod_base = OTHER; note = 2'-O-methylguanosine-3'-phosphorothioate
  modified_base 22: mod_base = OTHER; note = 2'-O-methyladenosine-3'-phosphorothioate
  modified_base 23: mod_base = OTHER; note = 2'-O-methylcytidine
  misc_feature 1..4: note = RNA
  misc_feature 6..23: note = RNA
  misc_feature 5: note = DNA
tgatagaggattaaagtgaggac

SEQ ID NO: 1356 - DNA, 23 bp, synthetic construct
  source 1..23: mol_type = other DNA
  modified_base 1: mod_base = OTHER; note = 2'-O-methyluridine-3'-phosphorothioate 5'-(E)-Vinylphosphonate
  modified_base 2: mod_base = OTHER; note = 2'-deoxyguanosine-3'-phosphorothioate
  modified_base 3: mod_base = OTHER; note = 2'-O-methyladenosine-3'-phosphate
  modified_base 4: mod_base = OTHER; note = 2'-O-methyluridine-3'-phosphate
  modified_base 6: mod_base = OTHER; note = 2'-O-methylguanosine-3'-phosphate
  modified_base 7: mod_base = OTHER; note = Adenosine-glycol nucleic acid (GNA), S-isomer
  modified_base 8: mod_base = OTHER; note = 2'-O-methylguanosine-3'-phosphate
  modified_base 9: mod_base = OTHER; note = 2'-O-methylguanosine-3'-phosphate
  modified_base 10: mod_base = OTHER; note = 2'-O-methyladenosine-3'-phosphate
  modified_base 11: mod_base = OTHER; note = 2'-O-methyluridine-3'-phosphate
  modified_base 13: mod_base = OTHER; note = 2'-O-methyladenosine-3'-phosphate
  modified_base 15: mod_base = OTHER; note = 2'-O-methyladenosine-3'-phosphate
  modified_base 17: mod_base = OTHER; note = 2'-O-methyluridine-3'-phosphate
  modified_base 18: mod_base = OTHER; note = 2'-O-methylguanosine-3'-phosphate
  modified_base 19: mod_base = OTHER; note = 2'-O-methyladenosine-3'-phosphate
  modified_base 20: mod_base = OTHER; note = 2'-O-methylguanosine-3'-phosphate
  modified_base 21: mod_base = OTHER; note = 2'-O-methylguanosine-3'-phosphorothioate
  modified_base 22: mod_base = OTHER; note = 2'-O-methyladenosine-3'-phosphorothioate
  modified_base 23: mod_base = OTHER; note = 2'-O-methylcytidine
  misc_feature 1: note = RNA
  misc_feature 3..4: note = RNA
  misc_feature 6..11: note = RNA
  misc_feature 13: note = RNA
  misc_feature 15: note = RNA
  misc_feature 17..23: note = RNA
  misc_feature 2: note = DNA
  misc_feature 5: note = DNA
  misc_feature 12: note = DNA
  misc_feature 14: note = DNA
  misc_feature 16: note = DNA
tgatagaggattaaagtgaggac

SEQ ID NO: 1357 - DNA, 23 bp, synthetic construct
  source 1..23: mol_type = other DNA
  modified_base 1: mod_base = OTHER; note = 2'-O-methyluridine-3'-phosphorothioate 5'-(E)-Vinylphosphonate
  modified_base 2: mod_base = OTHER; note = 2'-deoxycytidine-3'-phosphorothioate
  modified_base 3: mod_base = OTHER; note = 2'-O-methyluridine-3'-phosphate
  modified_base 4: mod_base = OTHER; note = 2'-O-methylguanosine-3'-phosphate
  modified_base 6: mod_base = OTHER; note = 2'-O-methyladenosine-3'-phosphate
  modified_base 8: mod_base = OTHER; note = 2'-O-methyladenosine-3'-phosphate
  modified_base 9: mod_base = OTHER; note = 2'-O-methylguanosine-3'-phosphate
  modified_base 10: mod_base = OTHER; note = 2'-O-methyladenosine-3'-phosphate
  modified_base 11: mod_base = OTHER; note = 2'-O-methylguanosine-3'-phosphate
  modified_base 13: mod_base = OTHER; note = 2'-O-methyladenosine-3'-phosphate
  modified_base 15: mod_base = OTHER; note = 2'-O-methyluridine-3'-phosphate
  modified_base 17: mod_base = OTHER; note = 2'-O-methyladenosine-3'-phosphate
  modified_base 18: mod_base = OTHER; note = 2'-O-methyladenosine-3'-phosphate
  modified_base 19: mod_base = OTHER; note = 2'-O-methylguanosine-3'-phosphate
  modified_base 20: mod_base = OTHER; note = 2'-O-methyluridine-3'-phosphate
  modified_base 21: mod_base = OTHER; note = 2'-O-methylguanosine-3'-phosphorothioate
  modified_base 22: mod_base = OTHER; note = 2'-O-methyladenosine-3'-phosphorothioate
  modified_base 23: mod_base = OTHER; note = 2'-O-methylguanosine
  misc_feature 1: note = RNA
  misc_feature 3..4: note = RNA
  misc_feature 6: note = RNA
  misc_feature 8..11: note = RNA
  misc_feature 13: note = RNA
  misc_feature 15: note = RNA
  misc_feature 17..23: note = RNA
  misc_feature 2: note = DNA
  misc_feature 5: note = DNA
  misc_feature 7: note = DNA
  misc_feature 12: note = DNA
  misc_feature 14: note = DNA
  misc_feature 16: note = DNA
tctggatagaggattaaagtgag

SEQ ID NO: 1358 - DNA, 23 bp, synthetic construct
  source 1..23: mol_type = other DNA
  modified_base 1: mod_base = OTHER; note = 2'-O-methyluridine-3'-phosphorothioate 5'-(E)-Vinylphosphonate
  modified_base 2: mod_base = OTHER; note = 2'-deoxyadenosine-3'-phosphorothioate
  modified_base 3: mod_base = OTHER; note = 2'-O-methylcytidine-3'-phosphate
  modified_base 4: mod_base = OTHER; note = 2'-O-methyladenosine-3'-phosphate
  modified_base 6: mod_base = OTHER; note = 2'-O-methylguanosine-3'-phosphate
  modified_base 7: mod_base = OTHER; note = cytidine-2'-phosphate
  modified_base 8: mod_base = OTHER; note = 2'-O-methylcytidine-3'-phosphate
  modified_base 9: mod_base = OTHER; note = 2'-O-methyluridine-3'-phosphate
  modified_base 10: mod_base = OTHER; note = 2'-O-methylcytidine-3'-phosphate
  modified_base 11: mod_base = OTHER; note = 2'-O-methyluridine-3'-phosphate
  modified_base 13: mod_base = OTHER; note = 2'-O-methyluridine-3'-phosphate
  modified_base 14: mod_base = OTHER; note = 2'-deoxy-2'-fluorouridine-3'-phosphate
  modified_base 15: mod_base = OTHER; note = 2'-O-methylcytidine-3'-phosphate
  modified_base 16: mod_base = OTHER; note = 2'-O-methyladenosine-3'-phosphate
  modified_base 17: mod_base = OTHER; note = 2'-O-methyluridine-3'-phosphate
  modified_base 18: mod_base = OTHER; note = 2'-O-methylcytidine-3'-phosphate
  modified_base 19: mod_base = OTHER; note = 2'-O-methylcytidine-3'-phosphate
  modified_base 20: mod_base = OTHER; note = 2'-O-methyluridine-3'-phosphate
  modified_base 21: mod_base = OTHER; note = 2'-O-methyluridine-3'-phosphorothioate
  modified_base 22: mod_base = OTHER; note = 2'-O-methyluridine-3'-phosphorothioate
  modified_base 23: mod_base = OTHER; note = 2'-O-methylguanosine
  misc_feature 1: note = RNA
  misc_feature 3..4: note = RNA
  misc_feature 6..11: note = RNA
  misc_feature 13..23: note = RNA
  misc_feature 2: note = DNA
  misc_feature 5: note = DNA
  misc_feature 12: note = DNA
tacatgcctctcttcatcctttg

SEQ ID NO: 1359 - DNA, 23 bp, synthetic construct
  source 1..23: mol_type = other DNA
  modified_base 1: mod_base = OTHER; note = 2'-O-methyluridine-3'-phosphorothioate 5'-(E)-Vinylphosphonate
  modified_base 2: mod_base = OTHER; note = 2'-deoxyadenosine-3'-phosphorothioate
  modified_base 3: mod_base = OTHER; note = 2'-O-methyladenosine-3'-phosphate
  modified_base 4: mod_base = OTHER; note = 2'-O-methylcytidine-3'-phosphate
  modified_base 6: mod_base = OTHER; note = 2'-O-methyluridine-3'-phosphate
  modified_base 7: mod_base = OTHER; note = guanosine-2'-phosphate
  modified_base 8: mod_base = OTHER; note = 2'-O-methylcytidine-3'-phosphate
  modified_base 9: mod_base = OTHER; note = 2'-O-methylcytidine-3'-phosphate
  modified_base 10: mod_base = OTHER; note = 2'-O-methyluridine-3'-phosphate
  modified_base 11: mod_base = OTHER; note = 2'-O-methylcytidine-3'-phosphate
  modified_base 13: mod_base = OTHER; note = 2'-O-methylcytidine-3'-phosphate
  modified_base 14: mod_base = OTHER; note = 2'-deoxy-2'-fluorouridine-3'-phosphate
  modified_base 15: mod_base = OTHER; note = 2'-O-methyluridine-3'-phosphate
  modified_base 16: mod_base = OTHER; note = 2'-O-methylcytidine-3'-phosphate
  modified_base 17: mod_base = OTHER; note = 2'-O-methyladenosine-3'-phosphate
  modified_base 18: mod_base = OTHER; note = 2'-O-methyluridine-3'-phosphate
  modified_base 19: mod_base = OTHER; note = 2'-O-methylcytidine-3'-phosphate
  modified_base 20: mod_base = OTHER; note = 2'-O-methylcytidine-3'-phosphate
  modified_base 21: mod_base = OTHER; note = 2'-O-methyluridine-3'-phosphorothioate
  modified_base 22: mod_base = OTHER; note = 2'-O-methyluridine-3'-phosphorothioate
  modified_base 23: mod_base = OTHER; note = 2'-O-methyluridine
  misc_feature 1: note = RNA
  misc_feature 3..4: note = RNA
  misc_feature 6..11: note = RNA
  misc_feature 13..23: note = RNA
  misc_feature 2: note = DNA
  misc_feature 5: note = DNA
  misc_feature 12: note = DNA
taacatgcctctcttcatccttt

SEQ ID NO: 1360 - DNA, 23 bp, synthetic construct
  source 1..23: mol_type = other DNA
  modified_base 1: mod_base = OTHER; note = 2'-O-methyluridine-3'-phosphorothioate 5'-(E)-Vinylphosphonate
  modified_base 2: mod_base = OTHER; note = 2'-deoxy-2'-fluorouridine-3'-phosphorothioate
  modified_base 3: mod_base = OTHER; note = 2'-O-methylcytidine-3'-phosphate
  modified_base 4: mod_base = OTHER; note = 2'-O-methyladenosine-3'-phosphate
  modified_base 6: mod_base = OTHER; note = 2'-O-methyluridine-3'-phosphate
  modified_base 7: mod_base = OTHER; note = Thymidine-glycol nucleic acid (GNA), S-Isomer
  modified_base 8: mod_base = OTHER; note = 2'-O-methylcytidine-3'-phosphate
  modified_base 9: mod_base = OTHER; note = 2'-O-methylcytidine-3'-phosphate
  modified_base 10: mod_base = OTHER; note = 2'-O-methyladenosine-3'-phosphate
  modified_base 11: mod_base = OTHER; note = 2'-O-methylcytidine-3'-phosphate
  modified_base 12: mod_base = OTHER; note = 2'-O-methylcytidine-3'-phosphate
  modified_base 13: mod_base = OTHER; note = 2'-O-methyluridine-3'-phosphate
  modified_base 14: mod_base = OTHER; note = 2'-deoxy-2'-fluorouridine-3'-phosphate
  modified_base 15: mod_base = OTHER; note = 2'-O-methyluridine-3'-phosphate
  modified_base 16: mod_base = OTHER; note = 2'-deoxy-2'-fluoroguanosine-3'-phosphate
  modified_base 17: mod_base = OTHER; note = 2'-O-methylcytidine-3'-phosphate
  modified_base 18: mod_base = OTHER; note = 2'-O-methylcytidine-3'-phosphate
  modified_base 19: mod_base = OTHER; note = 2'-O-methylcytidine-3'-phosphate
  modified_base 20: mod_base = OTHER; note = 2'-O-methyladenosine-3'-phosphate
  modified_base 21: mod_base = OTHER; note = 2'-O-methyladenosine-3'-phosphorothioate
  modified_base 22: mod_base = OTHER; note = 2'-O-methylguanosine-3'-phosphorothioate
  modified_base 23: mod_base = OTHER; note = 2'-O-methyluridine
  misc_feature 1..4: note = RNA
  misc_feature 6..23: note = RNA
  misc_feature 5: note = DNA
ttcatttccacctttgcccaagt

SEQ ID NO: 1361 - DNA, 23 bp, synthetic construct
  source 1..23: mol_type = other DNA
  modified_base 1: mod_base = OTHER; note = 2'-O-methyluridine-3'-phosphorothioate 5'-(E)-Vinylphosphonate
  modified_base 2: mod_base = OTHER; note = 2'-deoxythymidine-3'-phosphorothioate
  modified_base 3: mod_base = OTHER; note = 2'-O-methylcytidine-3'-phosphate
  modified_base 4: mod_base = OTHER; note = 2'-O-methyladenosine-3'-phosphate
  modified_base 6: mod_base = OTHER; note = 2'-O-methyluridine-3'-phosphate
  modified_base 7: mod_base = OTHER; note = Thymidine-glycol nucleic acid (GNA), S-Isomer
  modified_base 8: mod_base = OTHER; note = 2'-O-methylcytidine-3'-phosphate
  modified_base 9: mod_base = OTHER; note = 2'-O-methylcytidine-3'-phosphate
  modified_base 10: mod_base = OTHER; note = 2'-O-methyladenosine-3'-phosphate
  modified_base 11: mod_base = OTHER; note = 2'-O-methylcytidine-3'-phosphate
  modified_base 13: mod_base = OTHER; note = 2'-O-methyluridine-3'-phosphate
  modified_base 14: mod_base = OTHER; note = 2'-deoxy-2'-fluorouridine-3'-phosphate
  modified_base 15: mod_base = OTHER; note = 2'-O-methyluridine-3'-phosphate
  modified_base 16: mod_base = OTHER; note = 2'-O-methylguanosine-3'-phosphate
  modified_base 17: mod_base = OTHER; note = 2'-O-methylcytidine-3'-phosphate
  modified_base 18: mod_base = OTHER; note = 2'-O-methylcytidine-3'-phosphate
  modified_base 19: mod_base = OTHER; note = 2'-O-methylcytidine-3'-phosphate
  modified_base 20: mod_base = OTHER; note = 2'-O-methyladenosine-3'-phosphate
  modified_base 21: mod_base = OTHER; note = 2'-O-methyladenosine-3'-phosphorothioate
  modified_base 22: mod_base = OTHER; note = 2'-O-methylguanosine-3'-phosphorothioate
  modified_base 23: mod_base = OTHER; note = 2'-O-methyluridine
  misc_feature 1: note = RNA
  misc_feature 3..4: note = RNA
  misc_feature 6..11: note = RNA
  misc_feature 13..23: note = RNA
  misc_feature 2: note = DNA
  misc_feature 5: note = DNA
  misc_feature 12: note = DNA
ttcatttccacctttgcccaagt

SEQ ID NO: 1362 - DNA, 23 bp, synthetic construct
  source 1..23: mol_type = other DNA
  modified_base 1: mod_base = OTHER; note = 2'-O-methyluridine-3'-phosphorothioate 5'-(E)-Vinylphosphonate
  modified_base 2: mod_base = OTHER; note = 2'-deoxy-2'-fluorouridine-3'-phosphorothioate
  modified_base 3: mod_base = OTHER; note = 2'-O-methyluridine-3'-phosphate
  modified_base 4: mod_base = OTHER; note = 2'-O-methylcytidine-3'-phosphate
  modified_base 6: mod_base = OTHER; note = 2'-O-methyluridine-3'-phosphate
  modified_base 7: mod_base = OTHER; note = cytidine-2'-phosphate
  modified_base 8: mod_base = OTHER; note = 2'-O-methyladenosine-3'-phosphate
  modified_base 9: mod_base = OTHER; note = 2'-O-methyluridine-3'-phosphate
  modified_base 10: mod_base = OTHER; note = 2'-O-methyluridine-3'-phosphate
  modified_base 11: mod_base = OTHER; note = 2'-O-methyluridine-3'-phosphate
  modified_base 12: mod_base = OTHER; note = 2'-O-methylcytidine-3'-phosphate
  modified_base 13: mod_base = OTHER; note = 2'-O-methylcytidine-3'-phosphate
  modified_base 14: mod_base = OTHER; note = 2'-deoxy-2'-fluoroadenosine-3'-phosphate
  modified_base 15: mod_base = OTHER; note = 2'-O-methylcytidine-3'-phosphate
  modified_base 16: mod_base = OTHER; note = 2'-deoxy-2'-fluorocytidine-3'-phosphate
  modified_base 17: mod_base = OTHER; note = 2'-O-methyluridine-3'-phosphate
  modified_base 18: mod_base = OTHER; note = 2'-O-methyluridine-3'-phosphate
  modified_base 19: mod_base = OTHER; note = 2'-O-methyluridine-3'-phosphate
  modified_base 20: mod_base = OTHER; note = 2'-O-methylguanosine-3'-phosphate
  modified_base 21: mod_base = OTHER; note = 2'-O-methylcytidine-3'-phosphorothioate
  modified_base 22: mod_base = OTHER; note = 2'-O-methylcytidine-3'-phosphorothioate
  modified_base 23: mod_base = OTHER; note = 2'-O-methylcytidine
  misc_feature 1..4: note = RNA
  misc_feature 6..23: note = RNA
  misc_feature 5: note = DNA
tttcttcatttccacctttgccc

SEQ ID NO: 1363 - DNA, 23 bp, synthetic construct
  source 1..23: mol_type = other DNA
  modified_base 1: mod_base = OTHER; note = 2'-O-methyluridine-3'-phosphorothioate 5'-(E)-Vinylphosphonate
  modified_base 2: mod_base = OTHER; note = 2'-deoxythymidine-3'-phosphorothioate
  modified_base 3: mod_base = OTHER; note = 2'-O-methyluridine-3'-phosphate
  modified_base 4: mod_base = OTHER; note = 2'-O-methylcytidine-3'-phosphate
  modified_base 6: mod_base = OTHER; note = 2'-O-methyluridine-3'-phosphate
  modified_base 7: mod_base = OTHER; note = cytidine-2'-phosphate
  modified_base 8: mod_base = OTHER; note = 2'-O-methyladenosine-3'-phosphate
  modified_base 9: mod_base = OTHER; note = 2'-O-methyluridine-3'-phosphate
  modified_base 10: mod_base = OTHER; note = 2'-O-methyluridine-3'-phosphate
  modified_base 11: mod_base = OTHER; note = 2'-O-methyluridine-3'-phosphate
  modified_base 13: mod_base = OTHER; note = 2'-O-methylcytidine-3'-phosphate
  modified_base 14: mod_base = OTHER; note = 2'-deoxy-2'-fluoroadenosine-3'-phosphate
  modified_base 15: mod_base = OTHER; note = 2'-O-methylcytidine-3'-phosphate
  modified_base 16: mod_base = OTHER; note = 2'-O-methylcytidine-3'-phosphate
  modified_base 17: mod_base = OTHER; note = 2'-O-methyluridine-3'-phosphate
  modified_base 18: mod_base = OTHER; note = 2'-O-methyluridine-3'-phosphate
  modified_base 19: mod_base = OTHER; note = 2'-O-methyluridine-3'-phosphate
  modified_base 20: mod_base = OTHER; note = 2'-O-methylguanosine-3'-phosphate
  modified_base 21: mod_base = OTHER; note = 2'-O-methylcytidine-3'-phosphorothioate
  modified_base 22: mod_base = OTHER; note = 2'-O-methylcytidine-3'-phosphorothioate
  modified_base 23: mod_base = OTHER; note = 2'-O-methylcytidine
  misc_feature 1: note = RNA
  misc_feature 3..4: note = RNA
  misc_feature 6..11: note = RNA
  misc_feature 13..23: note = RNA
  misc_feature 2: note = DNA
  misc_feature 5: note = DNA
  misc_feature 12: note = DNA
tttcttcatttccacctttgccc

SEQ ID NO: 1364 - DNA, 23 bp, synthetic construct
  source 1..23: mol_type = other DNA
  modified_base 1: mod_base = OTHER; note = 2'-O-methyluridine-3'-phosphorothioate 5'-(E)-Vinylphosphonate
  modified_base 2: mod_base = OTHER; note = 2'-deoxy-2'-fluorouridine-3'-phosphorothioate
  modified_base 3: mod_base = OTHER; note = 2'-O-methyladenosine-3'-phosphate
  modified_base 4: mod_base = OTHER; note = 2'-O-methylcytidine-3'-phosphate
  modified_base 6: mod_base = OTHER; note = 2'-O-methyluridine-3'-phosphate
  modified_base 7: mod_base = OTHER; note = Thymidine-glycol nucleic acid (GNA), S-Isomer
  modified_base 8: mod_base = OTHER; note = 2'-O-methylcytidine-3'-phosphate
  modified_base 9: mod_base = OTHER; note = 2'-O-methyluridine-3'-phosphate
  modified_base 10: mod_base = OTHER; note = 2'-O-methyluridine-3'-phosphate
  modified_base 11: mod_base = OTHER; note = 2'-O-methylcytidine-3'-phosphate
  modified_base 12: mod_base = OTHER; note = 2'-O-methyladenosine-3'-phosphate
  modified_base 13: mod_base = OTHER; note = 2'-O-methyluridine-3'-phosphate
  modified_base 14: mod_base = OTHER; note = 2'-deoxy-2'-fluorouridine-3'-phosphate
  modified_base 15: mod_base = OTHER; note = 2'-O-methyluridine-3'-phosphate
  modified_base 16: mod_base = OTHER; note = 2'-deoxy-2'-fluorocytidine-3'-phosphate
  modified_base 17: mod_base = OTHER; note = 2'-O-methylcytidine-3'-phosphate
  modified_base 18: mod_base = OTHER; note = 2'-O-methyladenosine-3'-phosphate
  modified_base 19: mod_base = OTHER; note = 2'-O-methylcytidine-3'-phosphate
  modified_base 20: mod_base = OTHER; note = 2'-O-methylcytidine-3'-phosphate
  modified_base 21: mod_base = OTHER; note = 2'-O-methyluridine-3'-phosphorothioate
  modified_base 22: mod_base = OTHER; note = 2'-O-methyluridine-3'-phosphorothioate
  modified_base 23: mod_base = OTHER; note = 2'-O-methyluridine
  misc_feature 1..4: note = RNA
  misc_feature 6..23: note = RNA
  misc_feature 5: note = DNA
ttactttcttcatttccaccttt

SEQ ID NO: 1365 - DNA, 23 bp, synthetic construct
  source 1..23: mol_type = other DNA
  modified_base 1: mod_base = OTHER; note = 2'-O-methyluridine-3'-phosphorothioate 5'-(E)-Vinylphosphonate
  modified_base 2: mod_base = OTHER; note = 2'-deoxythymidine-3'-phosphorothioate
  modified_base 3: mod_base = OTHER; note = 2'-O-methyladenosine-3'-phosphate
  modified_base 4: mod_base = OTHER; note = 2'-O-methylcytidine-3'-phosphate
  modified_base 6: mod_base = OTHER; note = 2'-O-methyluridine-3'-phosphate
  modified_base 7: mod_base = OTHER; note = Thymidine-glycol nucleic acid (GNA), S-Isomer
  modified_base 8: mod_base = OTHER; note = 2'-O-methylcytidine-3'-phosphate
  modified_base 9: mod_base = OTHER; note = 2'-O-methyluridine-3'-phosphate
  modified_base 10: mod_base = OTHER; note = 2'-O-methyluridine-3'-phosphate
  modified_base 11: mod_base = OTHER; note = 2'-O-methylcytidine-3'-phosphate
  modified_base 13: mod_base = OTHER; note = 2'-O-methyluridine-3'-phosphate
  modified_base 14: mod_base = OTHER; note = 2'-deoxy-2'-fluorouridine-3'-phosphate
  modified_base 15: mod_base = OTHER; note = 2'-O-methyluridine-3'-phosphate
  modified_base 16: mod_base = OTHER; note = 2'-O-methylcytidine-3'-phosphate
  modified_base 17: mod_base = OTHER; note = 2'-O-methylcytidine-3'-phosphate
  modified_base 18: mod_base = OTHER; note = 2'-O-methyladenosine-3'-phosphate
  modified_base 19: mod_base = OTHER; note = 2'-O-methylcytidine-3'-phosphate
  modified_base 20: mod_base = OTHER; note = 2'-O-methylcytidine-3'-phosphate
  modified_base 21: mod_base = OTHER; note = 2'-O-methyluridine-3'-phosphorothioate
  modified_base 22: mod_base = OTHER; note = 2'-O-methyluridine-3'-phosphorothioate
  modified_base 23: mod_base = OTHER; note = 2'-O-methyluridine
  misc_feature 1: note = RNA
  misc_feature 3..4: note = RNA
  misc_feature 6..11: note = RNA
  misc_feature 13..23: note = RNA
  misc_feature 2: note = DNA
  misc_feature 5: note = DNA
  misc_feature 12: note = DNA
ttactttcttcatttccaccttt

SEQ ID NO: 1366 - RNA, 12 nt, synthetic construct
  source 1..12: mol_type = other RNA
  modified_base 12: mod_base = OTHER; note = adenosine-3'-phosphate
aaaaaaaaaaaa

SEQ ID NO: 1367 - RNA, 12 nt, synthetic construct
  source 1..12: mol_type = other RNA
  modified_base 12: mod_base = OTHER; note = adenosine-3'-phosphate
aaaaaaaaaaaa

SEQ ID NO: 1368 - RNA, 12 nt, synthetic construct
  source 1..12: mol_type = other RNA
  modified_base 12: mod_base = OTHER; note = adenosine-3'-phosphate
aaaaaaaaaaaa

SEQ ID NO: 1369 - DNA, 22 bp, synthetic construct
  source 1..22: mol_type = other DNA
  modified_base 1: mod_base = OTHER; note = 2'-O-methyluridine-3'-phosphorothioate 5'-(E)-Vinylphosphonate
  modified_base 2: mod_base = OTHER; note = 2'-deoxycytidine-3'-phosphorothioate
  modified_base 3: mod_base = OTHER; note = 2'-O-methyluridine-3'-phosphate
  modified_base 4: mod_base = OTHER; note = 2'-O-methylguanosine-3'-phosphate
  modified_base 6: mod_base = OTHER; note = 2'-O-methyladenosine-3'-phosphate
  modified_base 8: mod_base = OTHER; note = 2'-O-methyladenosine-3'-phosphate
  modified_base 9: mod_base = OTHER; note = 2'-O-methylguanosine-3'-phosphate
  modified_base 10: mod_base = OTHER; note = 2'-O-methyladenosine-3'-phosphate
  modified_base 11: mod_base = OTHER; note = 2'-O-methylguanosine-3'-phosphate
  modified_base 13: mod_base = OTHER; note = 2'-O-methyladenosine-3'-phosphate
  modified_base 14: mod_base = OTHER; note = 2'-deoxy-2'-fluorouridine-3'-phosphate
  modified_base 15: mod_base = OTHER; note = 2'-O-methyluridine-3'-phosphate
  modified_base 16: mod_base = OTHER; note = 2'-O-methyladenosine-3'-phosphate
  modified_base 17: mod_base = OTHER; note = 2'-O-methyladenosine-3'-phosphate
  modified_base 18: mod_base = OTHER; note = 2'-O-methyladenosine-3'-phosphate
  modified_base 19: mod_base = OTHER; note = 2'-O-methylguanosine-3'-phosphate
  modified_base 20: mod_base = OTHER; note = 2'-O-methyluridine-3'-phosphate
  modified_base 21: mod_base = OTHER; note = 2'-O-methylguanosine-3'-phosphorothioate
  modified_base 22: mod_base = OTHER; note = 2'-O-methyladenosine
  misc_feature 1: note = RNA
  misc_feature 3..4: note = RNA
  misc_feature 6: note = RNA
  misc_feature 8..11: note = RNA
  misc_feature 13..22: note = RNA
  misc_feature 2: note = DNA
  misc_feature 5: note = DNA
  misc_feature 7: note = DNA
  misc_feature 12: note = DNA
tctggatagaggattaaagtga

SEQ ID NO: 1370 - DNA, 22 bp, synthetic construct
  source 1..22: mol_type = other DNA
  modified_base 1: mod_base = OTHER; note = 2'-O-methyluridine-3'-phosphorothioate 5'-(E)-Vinylphosphonate
  modified_base 2: mod_base = OTHER; note = 2'-deoxyadenosine-3'-phosphorothioate
  modified_base 3: mod_base = OTHER; note = 2'-O-methylguanosine-3'-phosphate
  modified_base 4: mod_base = OTHER; note = 2'-O-methylguanosine-3'-phosphate
  modified_base 6: mod_base = OTHER; note = 2'-O-methyluridine-3'-phosphate
  modified_base 8: mod_base = OTHER; note = 2'-O-methyladenosine-3'-phosphate
  modified_base 9: mod_base = OTHER; note = 2'-O-methyladenosine-3'-phosphate
  modified_base 10: mod_base = OTHER; note = 2'-O-methyladenosine-3'-phosphate
  modified_base 11: mod_base = OTHER; note = 2'-O-methylguanosine-3'-phosphate
  modified_base 13: mod_base = OTHER; note = 2'-O-methylguanosine-3'-phosphate
  modified_base 14: mod_base = OTHER; note = 2'-deoxy-2'-fluoroadenosine-3'-phosphate
  modified_base 15: mod_base = OTHER; note = 2'-O-methylguanosine-3'-phosphate
  modified_base 16: mod_base = OTHER; note = 2'-O-methylguanosine-3'-phosphate
  modified_base 17: mod_base = OTHER; note = 2'-O-methyladenosine-3'-phosphate
  modified_base 18: mod_base = OTHER; note = 2'-O-methylcytidine-3'-phosphate
  modified_base 19: mod_base = OTHER; note = 2'-O-methylcytidine-3'-phosphate
  modified_base 20: mod_base = OTHER; note = 2'-O-methyluridine-3'-phosphate
  modified_base 21: mod_base = OTHER; note = 2'-O-methylguanosine-3'-phosphorothioate
  modified_base 22: mod_base = OTHER; note = 2'-O-methylcytidine
  misc_feature 1: note = RNA
  misc_feature 3..4: note = RNA
  misc_feature 6: note = RNA
  misc_feature 8..11: note = RNA
  misc_feature 13..22: note = RNA
  misc_feature 2: note = DNA
  misc_feature 5: note = DNA
  misc_feature 7: note = DNA
  misc_feature 12: note = DNA
taggattaaagtgaggacctgc

SEQ ID NO: 1371 - DNA, 22 bp, synthetic construct
  source 1..22: mol_type = other DNA
  modified_base 1: mod_base = OTHER; note = 2'-O-methyluridine-3'-phosphorothioate 5'-(E)-Vinylphosphonate
  modified_base 2: mod_base = OTHER; note = 2'-deoxy-2'-fluorouridine-3'-phosphorothioate
  modified_base 3: mod_base = OTHER; note = 2'-O-methyluridine-3'-phosphate
  modified_base 4: mod_base = OTHER; note = 2'-O-methyladenosine-3'-phosphate
  modified_base 6: mod_base = OTHER; note = 2'-O-methyluridine-3'-phosphate
  modified_base 7: mod_base = OTHER; note = Thymidine-glycol nucleic acid (GNA), S-Isomer
  modified_base 8: mod_base = OTHER; note = 2'-O-methyluridine-3'-phosphate
  modified_base 9: mod_base = OTHER; note = 2'-O-methylcytidine-3'-phosphate
  modified_base 10: mod_base = OTHER; note = 2'-O-methylcytidine-3'-phosphate
  modified_base 11: mod_base = OTHER; note = 2'-O-methyluridine-3'-phosphate
  modified_base 12: mod_base = OTHER; note = 2'-O-methyluridine-3'-phosphate
  modified_base 13: mod_base = OTHER; note = 2'-O-methylcytidine-3'-phosphate
  modified_base 14: mod_base = OTHER; note = 2'-deoxy-2'-fluorouridine-3'-phosphate
  modified_base 15: mod_base = OTHER; note = 2'-O-methylguanosine-3'-phosphate
  modified_base 16: mod_base = OTHER; note = 2'-deoxy-2'-fluorocytidine-3'-phosphate
  modified_base 17: mod_base = OTHER; note = 2'-O-methyluridine-3'-phosphate
  modified_base 18: mod_base = OTHER; note = 2'-O-methylcytidine-3'-phosphate
  modified_base 19: mod_base = OTHER; note = 2'-O-methylguanosine-3'-phosphate
  modified_base 20: mod_base = OTHER; note = 2'-O-methyladenosine-3'-phosphate
  modified_base 21: mod_base = OTHER; note = 2'-O-methyladenosine-3'-phosphorothioate
  modified_base 22: mod_base = OTHER; note = 2'-O-methyladenosine
  misc_feature 1..4: note = RNA
  misc_feature 6..22: note = RNA
  misc_feature 5: note = DNA
tttactttccttctgctcgaaa

SEQ ID NO: 1372 - DNA, 22 bp, synthetic construct
  source 1..22: mol_type = other DNA
  modified_base 1: mod_base = OTHER; note = 2'-O-methyluridine-3'-phosphorothioate 5'-(E)-Vinylphosphonate
  modified_base 2: mod_base = OTHER; note = 2'-deoxy-2'-fluorouridine-3'-phosphorothioate
  modified_base 3: mod_base = OTHER; note = 2'-O-methyluridine-3'-phosphate
  modified_base 4: mod_base = OTHER; note = 2'-O-methylcytidine-3'-phosphate
  modified_base 6: mod_base = OTHER; note = 2'-O-methylcytidine-3'-phosphate
  modified_base 7: mod_base = OTHER; note = Thymidine-glycol nucleic acid (GNA), S-Isomer
  modified_base 8: mod_base = OTHER; note = 2'-O-methylguanosine-3'-phosphate
  modified_base 9: mod_base = OTHER; note = 2'-O-methylguanosine-3'-phosphate
  modified_base 10: mod_base = OTHER; note = 2'-O-methyluridine-3'-phosphate
  modified_base 11: mod_base = OTHER; note = 2'-O-methylcytidine-3'-phosphate
  modified_base 12: mod_base = OTHER; note = 2'-O-methylcytidine-3'-phosphate
  modified_base 13: mod_base = OTHER; note = 2'-O-methyladenosine-3'-phosphate
  modified_base 14: mod_base = OTHER; note = 2'-deoxy-2'-fluorouridine-3'-phosphate
  modified_base 15: mod_base = OTHER; note = 2'-O-methyluridine-3'-phosphate
  modified_base 16: mod_base = OTHER; note = 2'-deoxy-2'-fluoroadenosine-3'-phosphate
  modified_base 17: mod_base = OTHER; note = 2'-O-methylcytidine-3'-phosphate
  modified_base 18: mod_base = OTHER; note = 2'-O-methyluridine-3'-phosphate
  modified_base 19: mod_base = OTHER; note = 2'-O-methyluridine-3'-phosphate
  modified_base 20: mod_base = OTHER; note = 2'-O-methyluridine-3'-phosphate
  modified_base 21: mod_base = OTHER; note = 2'-O-methylcytidine-3'-phosphorothioate
  modified_base 22: mod_base = OTHER; note = 2'-O-methylcytidine
  misc_feature 1..4: note = RNA
  misc_feature 6..22: note = RNA
  misc_feature 5: note = DNA
tttcactggtccattactttcc

SEQ ID NO: 1373 - DNA, 22 bp, synthetic construct
  source 1..22: mol_type = other DNA
  modified_base 1: mod_base = OTHER; note = 2'-O-methyluridine-3'-phosphorothioate 5'-(E)-Vinylphosphonate
  modified_base 2: mod_base = OTHER; note = 2'-deoxy-2'-fluoroadenosine-3'-phosphorothioate
  modified_base 3: mod_base = OTHER; note = 2'-O-methyladenosine-3'-phosphate
  modified_base 4: mod_base = OTHER; note = 2'-O-methylcytidine-3'-phosphate
  modified_base 6: mod_base = OTHER; note = 2'-O-methyluridine-3'-phosphate
  modified_base 7: mod_base = OTHER; note = guanosine-2'-phosphate
  modified_base 8: mod_base = OTHER; note = 2'-O-methylcytidine-3'-phosphate
  modified_base 9: mod_base = OTHER; note = 2'-O-methylcytidine-3'-phosphate
  modified_base 10: mod_base = OTHER; note = 2'-O-methyluridine-3'-phosphate
  modified_base 11: mod_base = OTHER; note = 2'-O-methylcytidine-3'-phosphate
  modified_base 12: mod_base = OTHER; note = 2'-O-methyluridine-3'-phosphate
  modified_base 13: mod_base = OTHER; note = 2'-O-methylcytidine-3'-phosphate
  modified_base 14: mod_base = OTHER; note = 2'-deoxy-2'-fluorouridine-3'-phosphate
  modified_base 15: mod_base = OTHER; note = 2'-O-methyluridine-3'-phosphate
  modified_base 16: mod_base = OTHER; note = 2'-deoxy-2'-fluorocytidine-3'-phosphate
  modified_base 17: mod_base = OTHER; note = 2'-O-methyladenosine-3'-phosphate
  modified_base 18: mod_base = OTHER; note = 2'-O-methyluridine-3'-phosphate
  modified_base 19: mod_base = OTHER; note = 2'-O-methylcytidine-3'-phosphate
  modified_base 20: mod_base = OTHER; note = 2'-O-methylcytidine-3'-phosphate
  modified_base 21: mod_base = OTHER; note = 2'-O-methyluridine-3'-phosphorothioate
  modified_base 22: mod_base = OTHER; note = 2'-O-methyluridine
  misc_feature 1..4: note = RNA
  misc_feature 6..22: note = RNA
  misc_feature 5: note = DNA
taacatgcctctcttcatcctt

SEQ ID NO: 1374 - DNA, 22 bp, synthetic construct
  source 1..22: mol_type = other DNA
  modified_base 1: mod_base = OTHER; note = 2'-O-methyluridine-3'-phosphorothioate 5'-(E)-Vinylphosphonate
  modified_base 2: mod_base = OTHER; note = 2'-deoxyadenosine-3'-phosphorothioate
  modified_base 3: mod_base = OTHER; note = 2'-O-methylcytidine-3'-phosphate
  modified_base 4: mod_base = OTHER; note = 2'-O-methyluridine-3'-phosphate
  modified_base 6: mod_base = OTHER; note = 2'-O-methylguanosine-3'-phosphate
  modified_base 7: mod_base = OTHER; note = Thymidine-glycol nucleic acid (GNA), S-Isomer
  modified_base 8: mod_base = OTHER; note = 2'-O-methylcytidine-3'-phosphate
  modified_base 9: mod_base = OTHER; note = 2'-O-methylcytidine-3'-phosphate
  modified_base 10: mod_base = OTHER; note = 2'-O-methyladenosine-3'-phosphate
  modified_base 11: mod_base = OTHER; note = 2'-O-methyluridine-3'-phosphate
  modified_base 13: mod_base = OTHER; note = 2'-O-methyladenosine-3'-phosphate
  modified_base 14: mod_base = OTHER; note = 2'-deoxy-2'-fluorocytidine-3'-phosphate
  modified_base 15: mod_base = OTHER; note = 2'-O-methyluridine-3'-phosphate
  modified_base 16: mod_base = OTHER; note = 2'-O-methyluridine-3'-phosphate
  modified_base 17: mod_base = OTHER; note = 2'-O-methyluridine-3'-phosphate
  modified_base 18: mod_base = OTHER; note = 2'-O-methylcytidine-3'-phosphate
  modified_base 19: mod_base = OTHER; note = 2'-O-methylcytidine-3'-phosphate
  modified_base 20: mod_base = OTHER; note = 2'-O-methyluridine-3'-phosphate
  modified_base 21: mod_base = OTHER; note = 2'-O-methyluridine-3'-phosphorothioate
  modified_base 22: mod_base = OTHER; note = 2'-O-methylcytidine
  misc_feature 1: note = RNA
  misc_feature 3..4: note = RNA
  misc_feature 6..11: note = RNA
  misc_feature 13..22: note = RNA
  misc_feature 2: note = DNA
  misc_feature 5: note = DNA
  misc_feature 12: note = DNA
tactggtccattactttccttc

SEQ ID NO: 1375 - DNA, 22 bp, synthetic construct
  source 1..22: mol_type = other DNA
  modified_base 1: mod_base = OTHER; note = 2'-O-methyluridine-3'-phosphorothioate 5'-(E)-Vinylphosphonate
  modified_base 2: mod_base = OTHER; note = 2'-deoxy-2'-fluorouridine-3'-phosphorothioate
  modified_base 3: mod_base = OTHER; note = 2'-O-methylcytidine-3'-phosphate
  modified_base 4: mod_base = OTHER; note = 2'-O-methylcytidine-3'-phosphate
  modified_base 6: mod_base = OTHER; note = 2'-O-methyluridine-3'-phosphate
  modified_base 7: mod_base = OTHER; note = cytidine-2'-phosphate
  modified_base 8: mod_base = OTHER; note = 2'-O-methyluridine-3'-phosphate
  modified_base 9: mod_base = OTHER; note = 2'-O-methylguanosine-3'-phosphate
  modified_base 10: mod_base = OTHER; note = 2'-O-methylcytidine-3'-phosphate
  modified_base 11: mod_base = OTHER; note = 2'-O-methyluridine-3'-phosphate
  modified_base 12: mod_base = OTHER; note = 2'-O-methylcytidine-3'-phosphate
  modified_base 13: mod_base = OTHER; note = 2'-O-methylguanosine-3'-phosphate
  modified_base 14: mod_base = OTHER; note = 2'-deoxy-2'-fluoroadenosine-3'-phosphate
  modified_base 15: mod_base = OTHER; note = 2'-O-methyladenosine-3'-phosphate
  modified_base 16: mod_base = OTHER; note = 2'-deoxy-2'-fluoroadenosine-3'-phosphate
  modified_base 17: mod_base = OTHER; note = 2'-O-methyluridine-3'-phosphate
  modified_base 18: mod_base = OTHER; note = 2'-O-methyluridine-3'-phosphate
  modified_base 19: mod_base = OTHER; note = 2'-O-methylguanosine-3'-phosphate
  modified_base 20: mod_base = OTHER; note = 2'-O-methyladenosine-3'-phosphate
  modified_base 21: mod_base = OTHER; note = 2'-O-methyluridine-3'-phosphorothioate
  modified_base 22: mod_base = OTHER; note = 2'-O-methylguanosine
  misc_feature 1..4: note = RNA
  misc_feature 6..22: note = RNA
  misc_feature 5: note = DNA
ttccttctgctcgaaattgatg

SEQ ID NO: 1376 - DNA, 22 bp, synthetic construct
  source 1..22: mol_type = other DNA
  modified_base 1: mod_base = OTHER; note = 2'-O-methyluridine-3'-phosphorothioate 5'-(E)-Vinylphosphonate
  modified_base 2: mod_base = OTHER; note = 2'-deoxyguanosine-3'-phosphorothioate
  modified_base 3: mod_base = OTHER; note = 2'-O-methyladenosine-3'-phosphate
  modified_base 4: mod_base = OTHER; note = 2'-O-methyluridine-3'-phosphate
  modified_base 6: mod_base = OTHER; note = 2'-O-methylguanosine-3'-phosphate
  modified_base 7: mod_base = OTHER; note = Adenosine-glycol nucleic acid (GNA), S-isomer
  modified_base 8: mod_base = OTHER; note = 2'-O-methylguanosine-3'-phosphate
  modified_base 9: mod_base = OTHER; note = 2'-O-methylguanosine-3'-phosphate
  modified_base 10: mod_base = OTHER; note = 2'-O-methyladenosine-3'-phosphate
  modified_base 11: mod_base = OTHER; note = 2'-O-methyluridine-3'-phosphate
  modified_base 13: mod_base = OTHER; note = 2'-O-methyladenosine-3'-phosphate
  modified_base 14: mod_base = OTHER; note = 2'-deoxy-2'-fluoroadenosine-3'-phosphate
  modified_base 15: mod_base = OTHER; note = 2'-O-methyladenosine-3'-phosphate
  modified_base 16: mod_base = OTHER; note = 2'-O-methylguanosine-3'-phosphate
  modified_base 17: mod_base = OTHER; note = 2'-O-methyluridine-3'-phosphate
  modified_base 18: mod_base = OTHER; note = 2'-O-methylguanosine-3'-phosphate
  modified_base 19: mod_base = OTHER; note = 2'-O-methyladenosine-3'-phosphate
  modified_base 20: mod_base = OTHER; note = 2'-O-methylguanosine-3'-phosphate
  modified_base 21: mod_base = OTHER; note = 2'-O-methylguanosine-3'-phosphorothioate
  modified_base 22: mod_base = OTHER; note = 2'-O-methyladenosine
  misc_feature 1: note = RNA
  misc_feature 3..4: note = RNA
  misc_feature 6..11: note = RNA
  misc_feature 13..22: note = RNA
  misc_feature 2: note = DNA
  misc_feature 5: note = DNA
  misc_feature 12: note = DNA
tgatagaggattaaagtgagga

SEQ ID NO: 1377 - DNA, 22 bp, synthetic construct
  source 1..22: mol_type = other DNA
  modified_base 1: mod_base = OTHER; note = 2'-O-methyluridine-3'-phosphorothioate 5'-(E)-Vinylphosphonate
  modified_base 2: mod_base = OTHER; note = 2'-deoxy-2'-fluoroadenosine-3'-phosphorothioate
  modified_base 3: mod_base = OTHER; note = 2'-O-methylcytidine-3'-phosphate
  modified_base 4: mod_base = OTHER; note = 2'-O-methyladenosine-3'-phosphate
  modified_base 6: mod_base = OTHER; note = 2'-O-methylguanosine-3'-phosphate
  modified_base 7: mod_base = OTHER; note = cytidine-2'-phosphate
  modified_base 8: mod_base = OTHER; note = 2'-O-methylcytidine-3'-phosphate
  modified_base 9: mod_base = OTHER; note = 2'-O-methyluridine-3'-phosphate
  modified_base 10: mod_base = OTHER; note = 2'-O-methylcytidine-3'-phosphate
  modified_base 11: mod_base = OTHER; note = 2'-O-methyluridine-3'-phosphate
  modified_base 12: mod_base = OTHER; note = 2'-O-methylcytidine-3'-phosphate
  modified_base 13: mod_base = OTHER; note = 2'-O-methyluridine-3'-phosphate
  modified_base 14: mod_base = OTHER; note = 2'-deoxy-2'-fluorouridine-3'-phosphate
  modified_base 15: mod_base = OTHER; note = 2'-O-methylcytidine-3'-phosphate
  modified_base 16: mod_base = OTHER; note = 2'-deoxy-2'-fluoroadenosine-3'-phosphate
  modified_base 17: mod_base = OTHER; note = 2'-O-methyluridine-3'-phosphate
  modified_base 18: mod_base = OTHER; note = 2'-O-methylcytidine-3'-phosphate
  modified_base 19: mod_base = OTHER; note = 2'-O-methylcytidine-3'-phosphate
  modified_base 20: mod_base = OTHER; note = 2'-O-methyluridine-3'-phosphate
  modified_base 21: mod_base = OTHER; note = 2'-O-methyluridine-3'-phosphorothioate
  modified_base 22: mod_base = OTHER; note = 2'-O-methyluridine
  misc_feature 1..4: note = RNA
  misc_feature 6..22: note = RNA
  misc_feature 5: note = DNA
tacatgcctctcttcatccttt

SEQ ID NO: 1378 - DNA, 22 bp, synthetic construct
  source 1..22: mol_type = other DNA
  modified_base 1: mod_base = OTHER; note = 2'-O-methyluridine-3'-phosphorothioate 5'-(E)-Vinylphosphonate
  modified_base 2: mod_base = OTHER; note = 2'-deoxy-2'-fluorocytidine-3'-phosphorothioate
  modified_base 3: mod_base = OTHER; note = 2'-O-methyluridine-3'-phosphate
  modified_base 4: mod_base = OTHER; note = 2'-O-methyluridine-3'-phosphate
  modified_base 6: mod_base = OTHER; note = 2'-O-methylcytidine-3'-phosphate
  modified_base 7: mod_base = OTHER; note = cytidine-2'-phosphate
  modified_base 8: mod_base = OTHER; note = 2'-O-methyluridine-3'-phosphate
  modified_base 9: mod_base = OTHER; note = 2'-O-methyluridine-3'-phosphate
  modified_base 10: mod_base = OTHER; note = 2'-O-methylcytidine-3'-phosphate
  modified_base 11: mod_base = OTHER; note = 2'-O-methyluridine-3'-phosphate
  modified_base 12: mod_base = OTHER; note = 2'-O-methylguanosine-3'-phosphate
  modified_base 13: mod_base = OTHER; note = 2'-O-methylcytidine-3'-phosphate
  modified_base 14: mod_base = OTHER; note = 2'-deoxy-2'-fluorouridine-3'-phosphate
  modified_base 15: mod_base = OTHER; note = 2'-O-methylcytidine-3'-phosphate
  modified_base 16: mod_base = OTHER; note = 2'-deoxy-2'-fluoroguanosine-3'-phosphate
  modified_base 17: mod_base = OTHER; note = 2'-O-methyladenosine-3'-phosphate
  modified_base 18: mod_base = OTHER; note = 2'-O-methyladenosine-3'-phosphate
  modified_base 19: mod_base = OTHER; note = 2'-O-methyladenosine-3'-phosphate
  modified_base 20: mod_base = OTHER; note = 2'-O-methyluridine-3'-phosphate
  modified_base 21: mod_base = OTHER; note = 2'-O-methyluridine-3'-phosphorothioate
  modified_base 22: mod_base = OTHER; note = 2'-O-methylguanosine
  misc_feature 1..4: note = RNA
  misc_feature 6..22: note = RNA
  misc_feature 5: note = DNA
tctttccttctgctcgaaattg
